United States Patent Application Publication US 2026/0275379 A1, published September 17, 2026 (application 19/643,597).

The application's sequence listing, which the Patent Office published only in electronic form, follows.

SEQUENCE LISTING (3954 sequences)

SEQ ID NO: 1 - protein, 12 aa, synthetic construct
  VARIANT 1: note = Any amino acid
  VARIANT 3: note = Any amino acid
  VARIANT 4: note = Any amino acid
  VARIANT 5: note = Any amino acid
  VARIANT 10: note = Any amino acid
  VARIANT 11: note = Any amino acid
XNXXXRGDRXXL

SEQ ID NO: 2 - protein, 12 aa, synthetic construct
ANASARGDRAAL

SEQ ID NO: 3 - protein, 12 aa, synthetic construct
ANASARGDRGSL

SEQ ID NO: 4 - protein, 12 aa, synthetic construct
ANASARGDRGYL

SEQ ID NO: 5 - protein, 12 aa, synthetic construct
ANASARGDRQAL

SEQ ID NO: 6 - protein, 12 aa, synthetic construct
ANASARGDRQSL

SEQ ID NO: 7 - protein, 12 aa, synthetic construct
ANASARGDRQYL

SEQ ID NO: 8 - protein, 12 aa, synthetic construct
ANASGRGDRAAL

SEQ ID NO: 9 - protein, 12 aa, synthetic construct
ANASGRGDRASL

SEQ ID NO: 10 - protein, 12 aa, synthetic construct
ANASGRGDRAYL

SEQ ID NO: 11 - protein, 12 aa, synthetic construct
ANASGRGDRGAL

SEQ ID NO: 12 - protein, 12 aa, synthetic construct
ANASGRGDRGSL

SEQ ID NO: 13 - protein, 12 aa, synthetic construct
ANASGRGDRGYL

SEQ ID NO: 14 - protein, 12 aa, synthetic construct
ANASGRGDRQAL

SEQ ID NO: 15 - protein, 12 aa, synthetic construct
ANASGRGDRQSL

SEQ ID NO: 16 - protein, 12 aa, synthetic construct
ANASGRGDRQYL

SEQ ID NO: 17 - protein, 12 aa, synthetic construct
ANASMRGDRAAL

SEQ ID NO: 18 - protein, 12 aa, synthetic construct
ANASMRGDRASL

SEQ ID NO: 19 - protein, 12 aa, synthetic construct
ANASMRGDRAYL

SEQ ID NO: 20 - protein, 12 aa, synthetic construct
ANASMRGDRQAL

SEQ ID NO: 21 - protein, 12 aa, synthetic construct
ANASMRGDRQSL

SEQ ID NO: 22 - protein, 12 aa, synthetic construct
ANASSRGDRGSL

SEQ ID NO: 23 - protein, 12 aa, synthetic construct
ANASSRGDRGYL

SEQ ID NO: 24 - protein, 12 aa, synthetic construct
ANASSRGDRQAL

SEQ ID NO: 25 - protein, 12 aa, synthetic construct
ANASSRGDRQSL

SEQ ID NO: 26 - protein, 12 aa, synthetic construct
ANASSRGDRQYL

SEQ ID NO: 27 - protein, 12 aa, synthetic construct
ANASTRGDRASL

SEQ ID NO: 28 - protein, 12 aa, synthetic construct
ANASTRGDRAYL

SEQ ID NO: 29 - protein, 12 aa, synthetic construct
ANASTRGDRGAL

SEQ ID NO: 30 - protein, 12 aa, synthetic construct
ANASTRGDRGSL

SEQ ID NO: 31 - protein, 12 aa, synthetic construct
ANASTRGDRGYL

SEQ ID NO: 32 - protein, 12 aa, synthetic construct
ANASTRGDRQAL

SEQ ID NO: 33 - protein, 12 aa, synthetic construct
ANASTRGDRQSL

SEQ ID NO: 34 - protein, 12 aa, synthetic construct
ANASTRGDRQYL

SEQ ID NO: 35 - protein, 12 aa, synthetic construct
ANASVRGDRASL

SEQ ID NO: 36 - protein, 12 aa, synthetic construct
ANASVRGDRGYL

SEQ ID NO: 37 - protein, 12 aa, synthetic construct
ANASVRGDRQAL

SEQ ID NO: 38 - protein, 12 aa, synthetic construct
ANASVRGDRQSL

SEQ ID NO: 39 - protein, 12 aa, synthetic construct
ANASVRGDRQYL

SEQ ID NO: 40 - protein, 12 aa, synthetic construct
ANGNFRGDRQNL

SEQ ID NO: 41 - protein, 12 aa, synthetic construct
ANGNVRGDRGML

SEQ ID NO: 42 - protein, 12 aa, synthetic construct
ANGSARGDRAYL

SEQ ID NO: 43 - protein, 12 aa, synthetic construct
ANGSARGDRGSL

SEQ ID NO: 44 - protein, 12 aa, synthetic construct
ANGSARGDRGYL

SEQ ID NO: 45 - protein, 12 aa, synthetic construct
ANGSARGDRQAL

SEQ ID NO: 46 - protein, 12 aa, synthetic construct
ANGSARGDRQYL

SEQ ID NO: 47 - protein, 12 aa, synthetic construct
ANGSGRGDRAAL

SEQ ID NO: 48 - protein, 12 aa, synthetic construct
ANGSGRGDRAYL

SEQ ID NO: 49 - protein, 12 aa, synthetic construct
ANGSGRGDRGAL

SEQ ID NO: 50 - protein, 12 aa, synthetic construct
ANGSGRGDRGSL

SEQ ID NO: 51 - protein, 12 aa, synthetic construct
ANGSGRGDRGYL

SEQ ID NO: 52 - protein, 12 aa, synthetic construct
ANGSGRGDRQAL

SEQ ID NO: 53 - protein, 12 aa, synthetic construct
ANGSGRGDRQSL

SEQ ID NO: 54 - protein, 12 aa, synthetic construct
ANGSGRGDRQYL

SEQ ID NO: 55 - protein, 12 aa, synthetic construct
ANGSMRGDRGYL

SEQ ID NO: 56 - protein, 12 aa, synthetic construct
ANGSMRGDRQAL

SEQ ID NO: 57 - protein, 12 aa, synthetic construct
ANGSMRGDRQSL

SEQ ID NO: 58 - protein, 12 aa, synthetic construct
ANGSMRGDRQYL

SEQ ID NO: 59 - protein, 12 aa, synthetic construct
ANGSSRGDRAYL

SEQ ID NO: 60 - protein, 12 aa, synthetic construct
ANGSSRGDRGSL

SEQ ID NO: 61 - protein, 12 aa, synthetic construct
ANGSSRGDRGYL

SEQ ID NO: 62 - protein, 12 aa, synthetic construct
ANGSSRGDRQAL

SEQ ID NO: 63 - protein, 12 aa, synthetic construct
ANGSSRGDRQSL

SEQ ID NO: 64 - protein, 12 aa, synthetic construct
ANGSSRGDRQYL

SEQ ID NO: 65 - protein, 12 aa, synthetic construct
ANGSTRGDRAAL

SEQ ID NO: 66 - protein, 12 aa, synthetic construct
ANGSTRGDRAYL

SEQ ID NO: 67 - protein, 12 aa, synthetic construct
ANGSTRGDRGAL

SEQ ID NO: 68 - protein, 12 aa, synthetic construct
ANGSTRGDRGYL

SEQ ID NO: 69 - protein, 12 aa, synthetic construct
ANGSTRGDRQAL

SEQ ID NO: 70 - protein, 12 aa, synthetic construct
ANGSTRGDRQSL

SEQ ID NO: 71 - protein, 12 aa, synthetic construct
ANGSTRGDRQYL

SEQ ID NO: 72 - protein, 12 aa, synthetic construct
ANGSVRGDRAYL

SEQ ID NO: 73 - protein, 12 aa, synthetic construct
ANGSVRGDRGYL

SEQ ID NO: 74 - protein, 12 aa, synthetic construct
ANGSVRGDRQAL

SEQ ID NO: 75 - protein, 12 aa, synthetic construct
ANGSVRGDRQYL

SEQ ID NO: 76 - protein, 12 aa, synthetic construct
ANSGMRGDRGAL

SEQ ID NO: 77 - protein, 12 aa, synthetic construct
ANSSARGDRGAL

SEQ ID NO: 78 - protein, 12 aa, synthetic construct
ANSSARGDRGSL

SEQ ID NO: 79 - protein, 12 aa, synthetic construct
ANSSARGDRGYL

SEQ ID NO: 80 - protein, 12 aa, synthetic construct
ANSSARGDRQAL

SEQ ID NO: 81 - protein, 12 aa, synthetic construct
ANSSARGDRQSL

SEQ ID NO: 82 - protein, 12 aa, synthetic construct
ANSSARGDRQYL

SEQ ID NO: 83 - protein, 12 aa, synthetic construct
ANSSGRGDRAAL

SEQ ID NO: 84 - protein, 12 aa, synthetic construct
ANSSGRGDRASL

SEQ ID NO: 85 - protein, 12 aa, synthetic construct
ANSSGRGDRAYL

SEQ ID NO: 86 - protein, 12 aa, synthetic construct
ANSSGRGDRGAL

SEQ ID NO: 87 - protein, 12 aa, synthetic construct
ANSSGRGDRGSL

SEQ ID NO: 88 - protein, 12 aa, synthetic construct
ANSSGRGDRGYL

SEQ ID NO: 89 - protein, 12 aa, synthetic construct
ANSSGRGDRQAL

SEQ ID NO: 90 - protein, 12 aa, synthetic construct
ANSSGRGDRQSL

SEQ ID NO: 91 - protein, 12 aa, synthetic construct
ANSSGRGDRQYL

SEQ ID NO: 92 - protein, 12 aa, synthetic construct
ANSSMRGDRAYL

SEQ ID NO: 93 - protein, 12 aa, synthetic construct
ANSSMRGDRQAL

SEQ ID NO: 94 - protein, 12 aa, synthetic construct
ANSSMRGDRQSL

SEQ ID NO: 95 - protein, 12 aa, synthetic construct
ANSSMRGDRQYL

SEQ ID NO: 96 - protein, 12 aa, synthetic construct
ANSSSRGDRGSL

SEQ ID NO: 97 - protein, 12 aa, synthetic construct
ANSSSRGDRGYL

SEQ ID NO: 98 - protein, 12 aa, synthetic construct
ANSSSRGDRQAL

SEQ ID NO: 99 - protein, 12 aa, synthetic construct
ANSSSRGDRQSL

SEQ ID NO: 100 - protein, 12 aa, synthetic construct
ANSSSRGDRQYL

SEQ ID NO: 101 - protein, 12 aa, synthetic construct
ANSSTRGDRAAL

SEQ ID NO: 102 - protein, 12 aa, synthetic construct
ANSSTRGDRGSL

SEQ ID NO: 103 - protein, 12 aa, synthetic construct
ANSSTRGDRQAL

SEQ ID NO: 104 - protein, 12 aa, synthetic construct
ANSSTRGDRQSL

SEQ ID NO: 105 - protein, 12 aa, synthetic construct
ANSSTRGDRQYL

SEQ ID NO: 106 - protein, 12 aa, synthetic construct
ANSSVRGDRAYL

SEQ ID NO: 107 - protein, 12 aa, synthetic construct
ANSSVRGDRGYL

SEQ ID NO: 108 - protein, 12 aa, synthetic construct
ANSSVRGDRQAL

SEQ ID NO: 109 - protein, 12 aa, synthetic construct
ANSSVRGDRQSL

SEQ ID NO: 110 - protein, 12 aa, synthetic construct
ANSSVRGDRQYL

SEQ ID NO: 111 - protein, 12 aa, synthetic construct
ANTSARGDRAYL

SEQ ID NO: 112 - protein, 12 aa, synthetic construct
ANTSARGDRGAL

SEQ ID NO: 113 - protein, 12 aa, synthetic construct
ANTSARGDRGSL

SEQ ID NO: 114 - protein, 12 aa, synthetic construct
ANTSARGDRGYL

SEQ ID NO: 115 - protein, 12 aa, synthetic construct
ANTSARGDRQAL

SEQ ID NO: 116 - protein, 12 aa, synthetic construct
ANTSARGDRQYL

SEQ ID NO: 117 - protein, 12 aa, synthetic construct
ANTSGRGDRASL

SEQ ID NO: 118 - protein, 12 aa, synthetic construct
ANTSGRGDRGAL

SEQ ID NO: 119 - protein, 12 aa, synthetic construct
ANTSGRGDRGSL

SEQ ID NO: 120 - protein, 12 aa, synthetic construct
ANTSGRGDRGYL

SEQ ID NO: 121 - protein, 12 aa, synthetic construct
ANTSGRGDRQAL

SEQ ID NO: 122 - protein, 12 aa, synthetic construct
ANTSGRGDRQSL

SEQ ID NO: 123 - protein, 12 aa, synthetic construct
ANTSGRGDRQYL

SEQ ID NO: 124 - protein, 12 aa, synthetic construct
ANTSMRGDRAYL

SEQ ID NO: 125 - protein, 12 aa, synthetic construct
ANTSMRGDRQAL

SEQ ID NO: 126 - protein, 12 aa, synthetic construct
ANTSMRGDRQSL

SEQ ID NO: 127 - protein, 12 aa, synthetic construct
ANTSMRGDRQYL

SEQ ID NO: 128 - protein, 12 aa, synthetic construct
ANTSSRGDRGSL

SEQ ID NO: 129 - protein, 12 aa, synthetic construct
ANTSSRGDRQAL

SEQ ID NO: 130 - protein, 12 aa, synthetic construct
ANTSSRGDRQYL

SEQ ID NO: 131 - protein, 12 aa, synthetic construct
ANTSTRGDRAAL

SEQ ID NO: 132 - protein, 12 aa, synthetic construct
ANTSTRGDRQAL

SEQ ID NO: 133 - protein, 12 aa, synthetic construct
ANTSTRGDRQSL

SEQ ID NO: 134 - protein, 12 aa, synthetic construct
ANTSTRGDRQYL

SEQ ID NO: 135 - protein, 12 aa, synthetic construct
ANTSVRGDRAYL

SEQ ID NO: 136 - protein, 12 aa, synthetic construct
ANTSVRGDRGSL

SEQ ID NO: 137 - protein, 12 aa, synthetic construct
ANTSVRGDRQAL

SEQ ID NO: 138 - protein, 12 aa, synthetic construct
ANTSVRGDRQSL

SEQ ID NO: 139 - protein, 12 aa, synthetic construct
ANTSVRGDRQYL

SEQ ID NO: 140 - protein, 12 aa, synthetic construct
ANYPHRGDRGAL

SEQ ID NO: 141 - protein, 12 aa, synthetic construct
ANYSARGDRAAL

SEQ ID NO: 142 - protein, 12 aa, synthetic construct
ANYSARGDRASL

SEQ ID NO: 143 - protein, 12 aa, synthetic construct
ANYSARGDRGAL

SEQ ID NO: 144 - protein, 12 aa, synthetic construct
ANYSARGDRGSL

SEQ ID NO: 145 - protein, 12 aa, synthetic construct
ANYSARGDRQAL

SEQ ID NO: 146 - protein, 12 aa, synthetic construct
ANYSARGDRQSL

SEQ ID NO: 147 - protein, 12 aa, synthetic construct
ANYSGRGDRAAL

SEQ ID NO: 148 - protein, 12 aa, synthetic construct
ANYSGRGDRASL

SEQ ID NO: 149 - protein, 12 aa, synthetic construct
ANYSGRGDRGAL

SEQ ID NO: 150 - protein, 12 aa, synthetic construct
ANYSGRGDRGSL

SEQ ID NO: 151 - protein, 12 aa, synthetic construct
ANYSGRGDRQAL

SEQ ID NO: 152 - protein, 12 aa, synthetic construct
ANYSGRGDRQSL

SEQ ID NO: 153 - protein, 12 aa, synthetic construct
ANYSGRGDRQYL

SEQ ID NO: 154 - protein, 12 aa, synthetic construct
ANYSMRGDRAAL

SEQ ID NO: 155 - protein, 12 aa, synthetic construct
ANYSMRGDRASL

SEQ ID NO: 156 - protein, 12 aa, synthetic construct
ANYSMRGDRAYL

SEQ ID NO: 157 - protein, 12 aa, synthetic construct
ANYSMRGDRQAL

SEQ ID NO: 158 - protein, 12 aa, synthetic construct
ANYSMRGDRQSL

SEQ ID NO: 159 - protein, 12 aa, synthetic construct
ANYSSRGDRGAL

SEQ ID NO: 160 - protein, 12 aa, synthetic construct
ANYSSRGDRGSL

SEQ ID NO: 161 - protein, 12 aa, synthetic construct
ANYSSRGDRQAL

SEQ ID NO: 162 - protein, 12 aa, synthetic construct
ANYSSRGDRQSL

SEQ ID NO: 163 - protein, 12 aa, synthetic construct
ANYSSRGDRQYL

SEQ ID NO: 164 - protein, 12 aa, synthetic construct
ANYSTRGDRQAL

SEQ ID NO: 165 - protein, 12 aa, synthetic construct
ANYSTRGDRQSL

SEQ ID NO: 166 - protein, 12 aa, synthetic construct
ANYSTRGDRQYL

SEQ ID NO: 167 - protein, 12 aa, synthetic construct
ANYSVRGDRQAL

SEQ ID NO: 168 - protein, 12 aa, synthetic construct
ANYSVRGDRQSL

SEQ ID NO: 169 - protein, 12 aa, synthetic construct
ANYSVRGDRQYL

SEQ ID NO: 170 - protein, 12 aa, synthetic construct
FNSGMRGDRGAL

SEQ ID NO: 171 - protein, 12 aa, synthetic construct
GNSGMRGDRGAL

SEQ ID NO: 172 - protein, 12 aa, synthetic construct
HNSGMRGDRGAL

SEQ ID NO: 173 - protein, 12 aa, synthetic construct
LNASARGDRAAL

SEQ ID NO: 174 - protein, 12 aa, synthetic construct
LNASARGDRASL

SEQ ID NO: 175 - protein, 12 aa, synthetic construct
LNASARGDRAYL

SEQ ID NO: 176 - protein, 12 aa, synthetic construct
LNASARGDRGAL

SEQ ID NO: 177 - protein, 12 aa, synthetic construct
LNASARGDRGSL

SEQ ID NO: 178 - protein, 12 aa, synthetic construct
LNASARGDRGYL

SEQ ID NO: 179 - protein, 12 aa, synthetic construct
LNASARGDRQAL

SEQ ID NO: 180 - protein, 12 aa, synthetic construct
LNASARGDRQSL

SEQ ID NO: 181 - protein, 12 aa, synthetic construct
LNASARGDRQYL

SEQ ID NO: 182 - protein, 12 aa, synthetic construct
LNASGRGDRAAL

SEQ ID NO: 183 - protein, 12 aa, synthetic construct
LNASGRGDRASL

SEQ ID NO: 184 - protein, 12 aa, synthetic construct
LNASGRGDRAYL

SEQ ID NO: 185 - protein, 12 aa, synthetic construct
LNASGRGDRGAL

SEQ ID NO: 186 - protein, 12 aa, synthetic construct
LNASGRGDRGSL

SEQ ID NO: 187 - protein, 12 aa, synthetic construct
LNASGRGDRGYL

SEQ ID NO: 188 - protein, 12 aa, synthetic construct
LNASGRGDRQAL

SEQ ID NO: 189 - protein, 12 aa, synthetic construct
LNASGRGDRQSL

SEQ ID NO: 190 - protein, 12 aa, synthetic construct
LNASGRGDRQYL

SEQ ID NO: 191 - protein, 12 aa, synthetic construct
LNASIRGDRQLL

SEQ ID NO: 192 - protein, 12 aa, synthetic construct
LNASMRGDRAAL

SEQ ID NO: 193 - protein, 12 aa, synthetic construct
LNASMRGDRASL

SEQ ID NO: 194 - protein, 12 aa, synthetic construct
LNASMRGDRAYL

SEQ ID NO: 195 - protein, 12 aa, synthetic construct
LNASMRGDRGAL

SEQ ID NO: 196 - protein, 12 aa, synthetic construct
LNASMRGDRGSL

SEQ ID NO: 197 - protein, 12 aa, synthetic construct
LNASMRGDRGYL

SEQ ID NO: 198 - protein, 12 aa, synthetic construct
LNASMRGDRQAL

SEQ ID NO: 199 - protein, 12 aa, synthetic construct
LNASMRGDRQSL

SEQ ID NO: 200 - protein, 12 aa, synthetic construct
LNASMRGDRQYL

SEQ ID NO: 201 - protein, 12 aa, synthetic construct
LNASSRGDRAAL

SEQ ID NO: 202 - protein, 12 aa, synthetic construct
LNASSRGDRASL

SEQ ID NO: 203 - protein, 12 aa, synthetic construct
LNASSRGDRGAL

SEQ ID NO: 204 - protein, 12 aa, synthetic construct
LNASSRGDRGSL

SEQ ID NO: 205 - protein, 12 aa, synthetic construct
LNASSRGDRQAL

SEQ ID NO: 206 - protein, 12 aa, synthetic construct
LNASSRGDRQSL

SEQ ID NO: 207 - protein, 12 aa, synthetic construct
LNASSRGDRQYL

SEQ ID NO: 208 - protein, 12 aa, synthetic construct
LNASTRGDRAAL

SEQ ID NO: 209 - protein, 12 aa, synthetic construct
LNASTRGDRASL

SEQ ID NO: 210 - protein, 12 aa, synthetic construct
LNASTRGDRGAL

SEQ ID NO: 211 - protein, 12 aa, synthetic construct
LNASTRGDRGSL

SEQ ID NO: 212 - protein, 12 aa, synthetic construct
LNASTRGDRGYL

SEQ ID NO: 213 - protein, 12 aa, synthetic construct
LNASTRGDRQAL

SEQ ID NO: 214 - protein, 12 aa, synthetic construct
LNASTRGDRQSL

SEQ ID NO: 215 - protein, 12 aa, synthetic construct
LNASTRGDRQYL

SEQ ID NO: 216 - protein, 12 aa, synthetic construct
LNASVRGDRAAL

SEQ ID NO: 217 - protein, 12 aa, synthetic construct
LNASVRGDRASL

SEQ ID NO: 218 - protein, 12 aa, synthetic construct
LNASVRGDRGAL

SEQ ID NO: 219 - protein, 12 aa, synthetic construct
LNASVRGDRGSL

SEQ ID NO: 220 - protein, 12 aa, synthetic construct
LNASVRGDRQAL

SEQ ID NO: 221 - protein, 12 aa, synthetic construct
LNASVRGDRQSL

SEQ ID NO: 222 - protein, 12 aa, synthetic construct
LNASVRGDRQYL

SEQ ID NO: 223 - protein, 12 aa, synthetic construct
LNGNFRGDRQNL

SEQ ID NO: 224 - protein, 12 aa, synthetic construct
LNGNVRGDRGML

SEQ ID NO: 225 - protein, 12 aa, synthetic construct
LNGSARGDRAAL

SEQ ID NO: 226 - protein, 12 aa, synthetic construct
LNGSARGDRAYL

SEQ ID NO: 227 - protein, 12 aa, synthetic construct
LNGSARGDRGSL

SEQ ID NO: 228 - protein, 12 aa, synthetic construct
LNGSARGDRGYL

SEQ ID NO: 229 - protein, 12 aa, synthetic construct
LNGSARGDRQAL

SEQ ID NO: 230 - protein, 12 aa, synthetic construct
LNGSARGDRQSL

SEQ ID NO: 231 - protein, 12 aa, synthetic construct
LNGSARGDRQYL

SEQ ID NO: 232 - protein, 12 aa, synthetic construct
LNGSGRGDRAAL

SEQ ID NO: 233 - protein, 12 aa, synthetic construct
LNGSGRGDRAYL

SEQ ID NO: 234 - protein, 12 aa, synthetic construct
LNGSGRGDRGAL

SEQ ID NO: 235 - protein, 12 aa, synthetic construct
LNGSGRGDRGSL

SEQ ID NO: 236 - protein, 12 aa, synthetic construct
LNGSGRGDRGYL

SEQ ID NO: 237 - protein, 12 aa, synthetic construct
LNGSGRGDRQAL

SEQ ID NO: 238 - protein, 12 aa, synthetic construct
LNGSGRGDRQYL

SEQ ID NO: 239 - protein, 12 aa, synthetic construct
LNGSMRGDRASL

SEQ ID NO: 240 - protein, 12 aa, synthetic construct
LNGSMRGDRGYL

SEQ ID NO: 241 - protein, 12 aa, synthetic construct
LNGSMRGDRQAL

SEQ ID NO: 242 - protein, 12 aa, synthetic construct
LNGSMRGDRQSL

SEQ ID NO: 243 - protein, 12 aa, synthetic construct
LNGSMRGDRQYL

SEQ ID NO: 244 - protein, 12 aa, synthetic construct
LNGSSRGDRAAL

SEQ ID NO: 245 - protein, 12 aa, synthetic construct
LNGSSRGDRAYL

SEQ ID NO: 246 - protein, 12 aa, synthetic construct
LNGSSRGDRGAL

SEQ ID NO: 247 - protein, 12 aa, synthetic construct
LNGSSRGDRQYL

SEQ ID NO: 248 - protein, 12 aa, synthetic construct
LNGSTRGDRAAL

SEQ ID NO: 249 - protein, 12 aa, synthetic construct
LNGSTRGDRASL

SEQ ID NO: 250 - protein, 12 aa, synthetic construct
LNGSTRGDRAYL

SEQ ID NO: 251 - protein, 12 aa, synthetic construct
LNGSTRGDRGAL

SEQ ID NO: 252 - protein, 12 aa, synthetic construct
LNGSTRGDRGSL

SEQ ID NO: 253 - protein, 12 aa, synthetic construct
LNGSTRGDRGYL

SEQ ID NO: 254 - protein, 12 aa, synthetic construct
LNGSTRGDRQAL

SEQ ID NO: 255 - protein, 12 aa, synthetic construct
LNGSTRGDRQSL

SEQ ID NO: 256 - protein, 12 aa, synthetic construct
LNGSTRGDRQYL

SEQ ID NO: 257 - protein, 12 aa, synthetic construct
LNGSVRGDRASL

SEQ ID NO: 258 - protein, 12 aa, synthetic construct
LNGSVRGDRAYL

SEQ ID NO: 259 - protein, 12 aa, synthetic construct
LNGSVRGDRGYL

SEQ ID NO: 260 - protein, 12 aa, synthetic construct
LNGSVRGDRQAL

SEQ ID NO: 261 - protein, 12 aa, synthetic construct
LNGSVRGDRQSL

SEQ ID NO: 262 - protein, 12 aa, synthetic construct
LNGSVRGDRQYL

SEQ ID NO: 263 - protein, 12 aa, synthetic construct
LNSGMRGDRGAL

SEQ ID NO: 264 - protein, 12 aa, synthetic construct
LNSSARGDRASL

SEQ ID NO: 265 - protein, 12 aa, synthetic construct
LNSSARGDRAYL

SEQ ID NO: 266 - protein, 12 aa, synthetic construct
LNSSARGDRGAL

SEQ ID NO: 267 - protein, 12 aa, synthetic construct
LNSSARGDRGIL

SEQ ID NO: 268 - protein, 12 aa, synthetic construct
LNSSARGDRGSL

SEQ ID NO: 269 - protein, 12 aa, synthetic construct
LNSSARGDRGYL

SEQ ID NO: 270 - protein, 12 aa, synthetic construct
LNSSARGDRQAL

SEQ ID NO: 271 - protein, 12 aa, synthetic construct
LNSSARGDRQSL

SEQ ID NO: 272 - protein, 12 aa, synthetic construct
LNSSARGDRQYL

SEQ ID NO: 273 - protein, 12 aa, synthetic construct
LNSSGRGDRAAL

SEQ ID NO: 274 - protein, 12 aa, synthetic construct
LNSSGRGDRASL

SEQ ID NO: 275 - protein, 12 aa, synthetic construct
LNSSGRGDRAYL

SEQ ID NO: 276 - protein, 12 aa, synthetic construct
LNSSGRGDRGAL

SEQ ID NO: 277 - protein, 12 aa, synthetic construct
LNSSGRGDRGSL

SEQ ID NO: 278 - protein, 12 aa, synthetic construct
LNSSGRGDRGYL

SEQ ID NO: 279 - protein, 12 aa, synthetic construct
LNSSGRGDRQAL

SEQ ID NO: 280 - protein, 12 aa, synthetic construct
LNSSGRGDRQSL

SEQ ID NO: 281 - protein, 12 aa, synthetic construct
LNSSGRGDRQYL

SEQ ID NO: 282 - protein, 12 aa, synthetic construct
LNSSMRGDRAAL

SEQ ID NO: 283 - protein, 12 aa, synthetic construct
LNSSMRGDRASL

SEQ ID NO: 284 - protein, 12 aa, synthetic construct
LNSSMRGDRAYL

SEQ ID NO: 285 - protein, 12 aa, synthetic construct
LNSSMRGDRGAL

SEQ ID NO: 286 - protein, 12 aa, synthetic construct
LNSSMRGDRGSL

SEQ ID NO: 287 - protein, 12 aa, synthetic construct
LNSSMRGDRQAL

SEQ ID NO: 288 - protein, 12 aa, synthetic construct
LNSSMRGDRQSL

SEQ ID NO: 289 - protein, 12 aa, synthetic construct
LNSSMRGDRQYL

SEQ ID NO: 290 - protein, 12 aa, synthetic construct
LNSSSRGDRAAL

SEQ ID NO: 291 - protein, 12 aa, synthetic construct
LNSSSRGDRGAL

SEQ ID NO: 292 - protein, 12 aa, synthetic construct
LNSSSRGDRGSL

SEQ ID NO: 293 - protein, 12 aa, synthetic construct
LNSSSRGDRQAL

SEQ ID NO: 294 - protein, 12 aa, synthetic construct
LNSSSRGDRQSL

SEQ ID NO: 295 - protein, 12 aa, synthetic construct
LNSSSRGDRQYL

SEQ ID NO: 296 - protein, 12 aa, synthetic construct
LNSSTRGDRAAL

SEQ ID NO: 297 - protein, 12 aa, synthetic construct
LNSSTRGDRASL

SEQ ID NO: 298 - protein, 12 aa, synthetic construct
LNSSTRGDRGAL

SEQ ID NO: 299 - protein, 12 aa, synthetic construct
LNSSTRGDRGSL

SEQ ID NO: 300 - protein, 12 aa, synthetic construct
LNSSTRGDRQAL

SEQ ID NO: 301 - protein, 12 aa, synthetic construct
LNSSTRGDRQSL

SEQ ID NO: 302 - protein, 12 aa, synthetic construct
LNSSTRGDRQYL

SEQ ID NO: 303 - protein, 12 aa, synthetic construct
LNSSVRGDRAAL

SEQ ID NO: 304 - protein, 12 aa, synthetic construct
LNSSVRGDRASL

SEQ ID NO: 305 - protein, 12 aa, synthetic construct
LNSSVRGDRGAL

SEQ ID NO: 306 - protein, 12 aa, synthetic construct
LNSSVRGDRGSL

SEQ ID NO: 307 - protein, 12 aa, synthetic construct
LNSSVRGDRGYL

SEQ ID NO: 308 - protein, 12 aa, synthetic construct
LNSSVRGDRQAL

SEQ ID NO: 309 - protein, 12 aa, synthetic construct
LNSSVRGDRQSL

SEQ ID NO: 310 - protein, 12 aa, synthetic construct
LNSSVRGDRQYL

SEQ ID NO: 311 - protein, 12 aa, synthetic construct
LNTSARGDRAAL

SEQ ID NO: 312 - protein, 12 aa, synthetic construct
LNTSARGDRASL

SEQ ID NO: 313 - protein, 12 aa, synthetic construct
LNTSARGDRAYL

SEQ ID NO: 314 - protein, 12 aa, synthetic construct
LNTSARGDRGAL

SEQ ID NO: 315 - protein, 12 aa, synthetic construct
LNTSARGDRGSL

SEQ ID NO: 316 - protein, 12 aa, synthetic construct
LNTSARGDRGYL

SEQ ID NO: 317 - protein, 12 aa, synthetic construct
LNTSARGDRQAL

SEQ ID NO: 318 - protein, 12 aa, synthetic construct
LNTSARGDRQSL

SEQ ID NO: 319 - protein, 12 aa, synthetic construct
LNTSARGDRQYL

SEQ ID NO: 320 - protein, 12 aa, synthetic construct
LNTSGRGDRAAL

SEQ ID NO: 321 - protein, 12 aa, synthetic construct
LNTSGRGDRASL

SEQ ID NO: 322 - protein, 12 aa, synthetic construct
LNTSGRGDRAYL

SEQ ID NO: 323 - protein, 12 aa, synthetic construct
LNTSGRGDRGAL

SEQ ID NO: 324 - protein, 12 aa, synthetic construct
LNTSGRGDRGSL

SEQ ID NO: 325 - protein, 12 aa, synthetic construct
LNTSGRGDRGYL

SEQ ID NO: 326 - protein, 12 aa, synthetic construct
LNTSGRGDRQAL

SEQ ID NO: 327 - protein, 12 aa, synthetic construct
LNTSGRGDRQSL

SEQ ID NO: 328 - protein, 12 aa, synthetic construct
LNTSGRGDRQYL

SEQ ID NO: 329 - protein, 12 aa, synthetic construct
LNTSMRGDRAAL

SEQ ID NO: 330 - protein, 12 aa, synthetic construct
LNTSMRGDRASL

SEQ ID NO: 331 - protein, 12 aa, synthetic construct
LNTSMRGDRAYL

SEQ ID NO: 332 - protein, 12 aa, synthetic construct
LNTSMRGDRGAL

SEQ ID NO: 333 - protein, 12 aa, synthetic construct
LNTSMRGDRGSL

SEQ ID NO: 334 - protein, 12 aa, synthetic construct
LNTSMRGDRQAL

SEQ ID NO: 335 - protein, 12 aa, synthetic construct
LNTSMRGDRQSL

SEQ ID NO: 336 - protein, 12 aa, synthetic construct
LNTSMRGDRQYL

SEQ ID NO: 337 - protein, 12 aa, synthetic construct
LNTSSRGDRAAL

SEQ ID NO: 338 - protein, 12 aa, synthetic construct
LNTSSRGDRGSL

SEQ ID NO: 339 - protein, 12 aa, synthetic construct
LNTSSRGDRQAL

SEQ ID NO: 340 - protein, 12 aa, synthetic construct
LNTSSRGDRQSL

SEQ ID NO: 341 - protein, 12 aa, synthetic construct
LNTSSRGDRQYL

SEQ ID NO: 342 - protein, 12 aa, synthetic construct
LNTSTRGDRAAL

SEQ ID NO: 343 - protein, 12 aa, synthetic construct
LNTSTRGDRASL

SEQ ID NO: 344 - protein, 12 aa, synthetic construct
LNTSTRGDRGAL

SEQ ID NO: 345 - protein, 12 aa, synthetic construct
LNTSTRGDRGSL

SEQ ID NO: 346 - protein, 12 aa, synthetic construct
LNTSTRGDRQAL

SEQ ID NO: 347 - protein, 12 aa, synthetic construct
LNTSTRGDRQSL

SEQ ID NO: 348 - protein, 12 aa, synthetic construct
LNTSTRGDRQYL

SEQ ID NO: 349 - protein, 12 aa, synthetic construct
LNTSVRGDRAAL

SEQ ID NO: 350 - protein, 12 aa, synthetic construct
LNTSVRGDRASL

SEQ ID NO: 351 - protein, 12 aa, synthetic construct
LNTSVRGDRAYL

SEQ ID NO: 352 - protein, 12 aa, synthetic construct
LNTSVRGDRGAL

SEQ ID NO: 353 - protein, 12 aa, synthetic construct
LNTSVRGDRGSL

SEQ ID NO: 354 - protein, 12 aa, synthetic construct
LNTSVRGDRQAL

SEQ ID NO: 355 - protein, 12 aa, synthetic construct
LNTSVRGDRQSL

SEQ ID NO: 356 - protein, 12 aa, synthetic construct
LNYPHRGDRGAL

SEQ ID NO: 357 - protein, 12 aa, synthetic construct
LNYSARGDRGAL

SEQ ID NO: 358 - protein, 12 aa, synthetic construct
LNYSARGDRGSL

SEQ ID NO: 359 - protein, 12 aa, synthetic construct
LNYSARGDRQAL

SEQ ID NO: 360 - protein, 12 aa, synthetic construct
LNYSARGDRQSL

SEQ ID NO: 361 - protein, 12 aa, synthetic construct
LNYSARGDRQYL

SEQ ID NO: 362 - protein, 12 aa, synthetic construct
LNYSGRGDRAAL

SEQ ID NO: 363 - protein, 12 aa, synthetic construct
LNYSGRGDRASL

SEQ ID NO: 364 - protein, 12 aa, synthetic construct
LNYSGRGDRGAL

SEQ ID NO: 365 - protein, 12 aa, synthetic construct
LNYSGRGDRGSL

SEQ ID NO: 366 - protein, 12 aa, synthetic construct
LNYSGRGDRQAL

SEQ ID NO: 367 - protein, 12 aa, synthetic construct
LNYSGRGDRQSL

SEQ ID NO: 368 - protein, 12 aa, synthetic construct
LNYSGRGDRQYL

SEQ ID NO: 369 - protein, 12 aa, synthetic construct
LNYSMRGDRQAL

SEQ ID NO: 370 - protein, 12 aa, synthetic construct
LNYSMRGDRQSL

SEQ ID NO: 371 - protein, 12 aa, synthetic construct
LNYSSRGDRGAL

SEQ ID NO: 372 - protein, 12 aa, synthetic construct
LNYSSRGDRGSL

SEQ ID NO: 373 - protein, 12 aa, synthetic construct
LNYSSRGDRQAL

SEQ ID NO: 374 - protein, 12 aa, synthetic construct
LNYSSRGDRQSL

SEQ ID NO: 375 - protein, 12 aa, synthetic construct
LNYSSRGDRQYL

SEQ ID NO: 376 - protein, 12 aa, synthetic construct
LNYSTRGDRASL

SEQ ID NO: 377 - protein, 12 aa, synthetic construct
LNYSTRGDRGAL

SEQ ID NO: 378 - protein, 12 aa, synthetic construct
LNYSTRGDRGSL

SEQ ID NO: 379 - protein, 12 aa, synthetic construct
LNYSTRGDRQAL

SEQ ID NO: 380 - protein, 12 aa, synthetic construct
LNYSTRGDRQSL

SEQ ID NO: 381 - protein, 12 aa, synthetic construct
LNYSTRGDRQYL

SEQ ID NO: 382 - protein, 12 aa, synthetic construct
LNYSVRGDRQAL

SEQ ID NO: 383 - protein, 12 aa, synthetic construct
LNYSVRGDRQSL

SEQ ID NO: 384 - protein, 12 aa, synthetic construct
MNASARGDRAAL

SEQ ID NO: 385 - protein, 12 aa, synthetic construct
MNASARGDRAYL

SEQ ID NO: 386 - protein, 12 aa, synthetic construct
MNASARGDRGSL

SEQ ID NO: 387 - protein, 12 aa, synthetic construct
MNASARGDRGYL

SEQ ID NO: 388 - protein, 12 aa, synthetic construct
MNASARGDRQAL

SEQ ID NO: 389 - protein, 12 aa, synthetic construct
MNASARGDRQSL

SEQ ID NO: 390 - protein, 12 aa, synthetic construct
MNASARGDRQYL

SEQ ID NO: 391 - protein, 12 aa, synthetic construct
MNASGRGDRAAL

SEQ ID NO: 392 - protein, 12 aa, synthetic construct
MNASGRGDRASL

SEQ ID NO: 393 - protein, 12 aa, synthetic construct
MNASGRGDRAYL

SEQ ID NO: 394 - protein, 12 aa, synthetic construct
MNASGRGDRGSL

SEQ ID NO: 395 - protein, 12 aa, synthetic construct
MNASGRGDRQAL

SEQ ID NO: 396 - protein, 12 aa, synthetic construct
MNASGRGDRQSL

SEQ ID NO: 397 - protein, 12 aa, synthetic construct
MNASGRGDRQYL

SEQ ID NO: 398 - protein, 12 aa, synthetic construct
MNASIRGDRQLL

SEQ ID NO: 399 - protein, 12 aa, synthetic construct
MNASMRGDRAAL

SEQ ID NO: 400 - protein, 12 aa, synthetic construct
MNASMRGDRAYL

SEQ ID NO: 401 - protein, 12 aa, synthetic construct
MNASMRGDRGAL

SEQ ID NO: 402 - protein, 12 aa, synthetic construct
MNASMRGDRQAL

SEQ ID NO: 403 - protein, 12 aa, synthetic construct
MNASMRGDRQSL

SEQ ID NO: 404 - protein, 12 aa, synthetic construct
MNASSRGDRAAL

SEQ ID NO: 405 - protein, 12 aa, synthetic construct
MNASTRGDRAAL

SEQ ID NO: 406 - protein, 12 aa, synthetic construct
MNASTRGDRASL

SEQ ID NO: 407 - protein, 12 aa, synthetic construct
MNASTRGDRAYL

SEQ ID NO: 408 - protein, 12 aa, synthetic construct
MNASTRGDRGAL

SEQ ID NO: 409 - protein, 12 aa, synthetic construct
MNASTRGDRGSL

SEQ ID NO: 410 - protein, 12 aa, synthetic construct
MNASTRGDRQAL

SEQ ID NO: 411 - protein, 12 aa, synthetic construct
MNASTRGDRQSL

SEQ ID NO: 412 - protein, 12 aa, synthetic construct
MNASTRGDRQYL

SEQ ID NO: 413 - protein, 12 aa, synthetic construct
MNASVRGDRAAL

SEQ ID NO: 414 - protein, 12 aa, synthetic construct
MNASVRGDRASL

SEQ ID NO: 415 - protein, 12 aa, synthetic construct
MNASVRGDRAYL

SEQ ID NO: 416 - protein, 12 aa, synthetic construct
MNASVRGDRQAL

SEQ ID NO: 417 - protein, 12 aa, synthetic construct
MNASVRGDRQSL

SEQ ID NO: 418 - protein, 12 aa, synthetic construct
MNASVRGDRQYL

SEQ ID NO: 419 - protein, 12 aa, synthetic construct
MNGNFRGDRQNL

SEQ ID NO: 420 - protein, 12 aa, synthetic construct
MNGSARGDRAYL

SEQ ID NO: 421 - protein, 12 aa, synthetic construct
MNGSARGDRGYL

SEQ ID NO: 422 - protein, 12 aa, synthetic construct
MNGSARGDRQAL

SEQ ID NO: 423 - protein, 12 aa, synthetic construct
MNGSARGDRQSL

SEQ ID NO: 424 - protein, 12 aa, synthetic construct
MNGSARGDRQYL

SEQ ID NO: 425 - protein, 12 aa, synthetic construct
MNGSGRGDRAAL

SEQ ID NO: 426 - protein, 12 aa, synthetic construct
MNGSGRGDRAYL

SEQ ID NO: 427 - protein, 12 aa, synthetic construct
MNGSGRGDRGAL

SEQ ID NO: 428 - protein, 12 aa, synthetic construct
MNGSGRGDRGSL

SEQ ID NO: 429 - protein, 12 aa, synthetic construct
MNGSGRGDRGYL

SEQ ID NO: 430 - protein, 12 aa, synthetic construct
MNGSGRGDRQAL

SEQ ID NO: 431 - protein, 12 aa, synthetic construct
MNGSGRGDRQSL

SEQ ID NO: 432 - protein, 12 aa, synthetic construct
MNGSGRGDRQYL

SEQ ID NO: 433 - protein, 12 aa, synthetic construct
MNGSMRGDRQAL

SEQ ID NO: 434 - protein, 12 aa, synthetic construct
MNGSMRGDRQSL

SEQ ID NO: 435 - protein, 12 aa, synthetic construct
MNGSMRGDRQYL

SEQ ID NO: 436 - protein, 12 aa, synthetic construct
MNGSSRGDRQYL

SEQ ID NO: 437 - protein, 12 aa, synthetic construct
MNGSTRGDRAYL

SEQ ID NO: 438 - protein, 12 aa, synthetic construct
MNGSTRGDRGAL

SEQ ID NO: 439 - protein, 12 aa, synthetic construct
MNGSTRGDRGYL

SEQ ID NO: 440 - protein, 12 aa, synthetic construct
MNGSTRGDRQAL

SEQ ID NO: 441 - protein, 12 aa, synthetic construct
MNGSTRGDRQSL

SEQ ID NO: 442 - protein, 12 aa, synthetic construct
MNGSTRGDRQYL

SEQ ID NO: 443 - protein, 12 aa, synthetic construct
MNGSVRGDRGYL

SEQ ID NO: 444 - protein, 12 aa, synthetic construct
MNGSVRGDRQAL

SEQ ID NO: 445 - protein, 12 aa, synthetic construct
MNGSVRGDRQYL

SEQ ID NO: 446 - protein, 12 aa, synthetic construct
MNSGMRGDRGAL

SEQ ID NO: 447 - protein, 12 aa, synthetic construct
MNSSARGDRAAL

SEQ ID NO: 448 - protein, 12 aa, synthetic construct
MNSSARGDRAYL

SEQ ID NO: 449 - protein, 12 aa, synthetic construct
MNSSARGDRGSL

SEQ ID NO: 450 - protein, 12 aa, synthetic construct
MNSSARGDRGYL

SEQ ID NO: 451 - protein, 12 aa, synthetic construct
MNSSARGDRQAL

SEQ ID NO: 452 - protein, 12 aa, synthetic construct
MNSSARGDRQSL

SEQ ID NO: 453 - protein, 12 aa, synthetic construct
MNSSARGDRQYL

SEQ ID NO: 454 - protein, 12 aa, synthetic construct
MNSSGRGDRAAL

SEQ ID NO: 455 - protein, 12 aa, synthetic construct
MNSSGRGDRASL

SEQ ID NO: 456 - protein, 12 aa, synthetic construct
MNSSGRGDRAYL

SEQ ID NO: 457 - protein, 12 aa, synthetic construct
MNSSGRGDRGAL

SEQ ID NO: 458 - protein, 12 aa, synthetic construct
MNSSGRGDRGSL

SEQ ID NO: 459 - protein, 12 aa, synthetic construct
MNSSGRGDRQAL

SEQ ID NO: 460 - protein, 12 aa, synthetic construct
MNSSGRGDRQSL

SEQ ID NO: 461 - protein, 12 aa, synthetic construct
MNSSGRGDRQYL

SEQ ID NO: 462 - protein, 12 aa, synthetic construct
MNSSMRGDRAAL

SEQ ID NO: 463 - protein, 12 aa, synthetic construct
MNSSMRGDRASL

SEQ ID NO: 464 - protein, 12 aa, synthetic construct
MNSSMRGDRAYL

SEQ ID NO: 465 - protein, 12 aa, synthetic construct
MNSSMRGDRGSL

SEQ ID NO: 466 - protein, 12 aa, synthetic construct
MNSSMRGDRQAL

SEQ ID NO: 467 - protein, 12 aa, synthetic construct
MNSSMRGDRQSL

SEQ ID NO: 468 - protein, 12 aa, synthetic construct
MNSSMRGDRQYL

SEQ ID NO: 469 - protein, 12 aa, synthetic construct
MNSSSRGDRAAL

SEQ ID NO: 470 - protein, 12 aa, synthetic construct
MNSSTRGDRAAL

SEQ ID NO: 471 - protein, 12 aa, synthetic construct
MNSSTRGDRASL

SEQ ID NO: 472 - protein, 12 aa, synthetic construct
MNSSTRGDRQAL

SEQ ID NO: 473 - protein, 12 aa, synthetic construct
MNSSTRGDRQSL

SEQ ID NO: 474 - protein, 12 aa, synthetic construct
MNSSTRGDRQYL

SEQ ID NO: 475 - protein, 12 aa, synthetic construct
MNSSVRGDRAAL

SEQ ID NO: 476 - protein, 12 aa, synthetic construct
MNSSVRGDRAYL

SEQ ID NO: 477 - protein, 12 aa, synthetic construct
MNSSVRGDRQAL

SEQ ID NO: 478 - protein, 12 aa, synthetic construct
MNSSVRGDRQSL

SEQ ID NO: 479 - protein, 12 aa, synthetic construct
MNSSVRGDRQYL

SEQ ID NO: 480 - protein, 12 aa, synthetic construct
MNTSARGDRAYL

SEQ ID NO: 481 - protein, 12 aa, synthetic construct
MNTSGRGDRAAL

SEQ ID NO: 482 - protein, 12 aa, synthetic construct
MNTSGRGDRQAL

SEQ ID NO: 483 - protein, 12 aa, synthetic construct
MNTSGRGDRQYL

SEQ ID NO: 484 - protein, 12 aa, synthetic construct
MNTSMRGDRAYL

SEQ ID NO: 485 - protein, 12 aa, synthetic construct
MNTSTRGDRQYL

SEQ ID NO: 486 - protein, 12 aa, synthetic construct
MNYPHRGDRGAL

SEQ ID NO: 487 - protein, 12 aa, synthetic construct
MNYSARGDRAAL

SEQ ID NO: 488 - protein, 12 aa, synthetic construct
MNYSARGDRGYL

SEQ ID NO: 489 - protein, 12 aa, synthetic construct
MNYSARGDRQAL

SEQ ID NO: 490 - protein, 12 aa, synthetic construct
MNYSARGDRQSL

SEQ ID NO: 491 - protein, 12 aa, synthetic construct
MNYSGRGDRAAL

SEQ ID NO: 492 - protein, 12 aa, synthetic construct
MNYSGRGDRASL

SEQ ID NO: 493 - protein, 12 aa, synthetic construct
MNYSGRGDRGSL

SEQ ID NO: 494 - protein, 12 aa, synthetic construct
MNYSGRGDRQAL

SEQ ID NO: 495 - protein, 12 aa, synthetic construct
MNYSGRGDRQSL

SEQ ID NO: 496 - protein, 12 aa, synthetic construct
MNYSSRGDRQAL

SEQ ID NO: 497 - protein, 12 aa, synthetic construct
MNYSTRGDRAAL

SEQ ID NO: 498 - protein, 12 aa, synthetic construct
MNYSTRGDRQAL

SEQ ID NO: 499 - protein, 12 aa, synthetic construct
MNYSTRGDRQSL

SEQ ID NO: 500 - protein, 12 aa, synthetic construct
MNYSTRGDRQYL

SEQ ID NO: 501 - protein, 12 aa, synthetic construct
NNSGMRGDRGAL

SEQ ID NO: 502 - protein, 12 aa, synthetic construct
QNSGMRGDRGAL

SEQ ID NO: 503 - protein, 12 aa, synthetic construct
SNASARGDRAAL

SEQ ID NO: 504 - protein, 12 aa, synthetic construct
SNASARGDRASL

SEQ ID NO: 505 - protein, 12 aa, synthetic construct
SNASARGDRAYL

SEQ ID NO: 506 - protein, 12 aa, synthetic construct
SNASARGDRGAL

SEQ ID NO: 507 - protein, 12 aa, synthetic construct
SNASARGDRGSL

SEQ ID NO: 508 - protein, 12 aa, synthetic construct
SNASARGDRGYL

SEQ ID NO: 509 - protein, 12 aa, synthetic construct
SNASARGDRQAL

SEQ ID NO: 510 - protein, 12 aa, synthetic construct
SNASARGDRQSL

SEQ ID NO: 511 - protein, 12 aa, synthetic construct
SNASARGDRQYL

SEQ ID NO: 512 - protein, 12 aa, synthetic construct
SNASGRGDRAAL

SEQ ID NO: 513 - protein, 12 aa, synthetic construct
SNASGRGDRASL

SEQ ID NO: 514 - protein, 12 aa, synthetic construct
SNASGRGDRAYL

SEQ ID NO: 515 - protein, 12 aa, synthetic construct
SNASGRGDRGAL

SEQ ID NO: 516 - protein, 12 aa, synthetic construct
SNASGRGDRGSL

SEQ ID NO: 517 - protein, 12 aa, synthetic construct
SNASGRGDRGYL

SEQ ID NO: 518 - protein, 12 aa, synthetic construct
SNASGRGDRQAL

SEQ ID NO: 519 - protein, 12 aa, synthetic construct
SNASGRGDRQSL

SEQ ID NO: 520 - protein, 12 aa, synthetic construct
SNASGRGDRQYL

SEQ ID NO: 521 - protein, 12 aa, synthetic construct
SNASIRGDRQLL

SEQ ID NO: 522 - protein, 12 aa, synthetic construct
SNASMRGDRAAL

SEQ ID NO: 523 - protein, 12 aa, synthetic construct
SNASMRGDRASL

SEQ ID NO: 524 - protein, 12 aa, synthetic construct
SNASMRGDRGAL

SEQ ID NO: 525 - protein, 12 aa, synthetic construct
SNASMRGDRGSL

SEQ ID NO: 526 - protein, 12 aa, synthetic construct
SNASMRGDRQAL

SEQ ID NO: 527 - protein, 12 aa, synthetic construct
SNASMRGDRQSL

SEQ ID NO: 528 - protein, 12 aa, synthetic construct
SNASSRGDRAAL

SEQ ID NO: 529 - protein, 12 aa, synthetic construct
SNASSRGDRASL

SEQ ID NO: 530 - protein, 12 aa, synthetic construct
SNASSRGDRAYL

SEQ ID NO: 531 - protein, 12 aa, synthetic construct
SNASSRGDRGAL

SEQ ID NO: 532 - protein, 12 aa, synthetic construct
SNASSRGDRGSL

SEQ ID NO: 533 - protein, 12 aa, synthetic construct
SNASSRGDRQAL

SEQ ID NO: 534 - protein, 12 aa, synthetic construct
SNASSRGDRQSL

SEQ ID NO: 535 - protein, 12 aa, synthetic construct
SNASSRGDRQYL

SEQ ID NO: 536 - protein, 12 aa, synthetic construct
SNASTRGDRAAL

SEQ ID NO: 537 - protein, 12 aa, synthetic construct
SNASTRGDRASL

SEQ ID NO: 538 - protein, 12 aa, synthetic construct
SNASTRGDRAYL

SEQ ID NO: 539 - protein, 12 aa, synthetic construct
SNASTRGDRGAL

SEQ ID NO: 540 - protein, 12 aa, synthetic construct
SNASTRGDRGSL

SEQ ID NO: 541 - protein, 12 aa, synthetic construct
SNASTRGDRGYL

SEQ ID NO: 542 - protein, 12 aa, synthetic construct
SNASTRGDRQAL

SEQ ID NO: 543 - protein, 12 aa, synthetic construct
SNASTRGDRQSL

SEQ ID NO: 544 - protein, 12 aa, synthetic construct
SNASTRGDRQYL

SEQ ID NO: 545 - protein, 12 aa, synthetic construct
SNASVRGDRAAL

SEQ ID NO: 546 - protein, 12 aa, synthetic construct
SNASVRGDRASL

SEQ ID NO: 547 - protein, 12 aa, synthetic construct
SNASVRGDRAYL

SEQ ID NO: 548 - protein, 12 aa, synthetic construct
SNASVRGDRGSL

SEQ ID NO: 549 - protein, 12 aa, synthetic construct
SNASVRGDRGYL

SEQ ID NO: 550 - protein, 12 aa, synthetic construct
SNASVRGDRQAL

SEQ ID NO: 551 - protein, 12 aa, synthetic construct
SNASVRGDRQSL

SEQ ID NO: 552 - protein, 12 aa, synthetic construct
SNASVRGDRQYL

SEQ ID NO: 553 - protein, 12 aa, synthetic construct
SNGNFRGDRQNL

SEQ ID NO: 554 - protein, 12 aa, synthetic construct
SNGNVRGDRGML

SEQ ID NO: 555 - protein, 12 aa, synthetic construct
SNGSARGDRGYL

SEQ ID NO: 556 - protein, 12 aa, synthetic construct
SNGSARGDRQAL

SEQ ID NO: 557 - protein, 12 aa, synthetic construct
SNGSARGDRQSL

SEQ ID NO: 558 - protein, 12 aa, synthetic construct
SNGSARGDRQYL

SEQ ID NO: 559 - protein, 12 aa, synthetic construct
SNGSGRGDRASL

SEQ ID NO: 560 - protein, 12 aa, synthetic construct
SNGSGRGDRAYL

SEQ ID NO: 561 - protein, 12 aa, synthetic construct
SNGSGRGDRGAL

SEQ ID NO: 562 - protein, 12 aa, synthetic construct
SNGSGRGDRGSL

SEQ ID NO: 563 - protein, 12 aa, synthetic construct
SNGSGRGDRGYL

SEQ ID NO: 564 - protein, 12 aa, synthetic construct
SNGSGRGDRQAL

SEQ ID NO: 565 - protein, 12 aa, synthetic construct
SNGSGRGDRQSL

SEQ ID NO: 566 - protein, 12 aa, synthetic construct
SNGSGRGDRQYL

SEQ ID NO: 567 - protein, 12 aa, synthetic construct
SNGSMRGDRAYL

SEQ ID NO: 568 - protein, 12 aa, synthetic construct
SNGSMRGDRGYL

SEQ ID NO: 569 - protein, 12 aa, synthetic construct
SNGSMRGDRQAL

SEQ ID NO: 570 - protein, 12 aa, synthetic construct
SNGSMRGDRQSL

SEQ ID NO: 571 - protein, 12 aa, synthetic construct
SNGSMRGDRQYL

SEQ ID NO: 572 - protein, 12 aa, synthetic construct
SNGSSRGDRGYL

SEQ ID NO: 573 - protein, 12 aa, synthetic construct
SNGSSRGDRQYL

SEQ ID NO: 574 - protein, 12 aa, synthetic construct
SNGSTRGDRAAL

SEQ ID NO: 575 - protein, 12 aa, synthetic construct
SNGSTRGDRASL

SEQ ID NO: 576 - protein, 12 aa, synthetic construct
SNGSTRGDRGAL

SEQ ID NO: 577 - protein, 12 aa, synthetic construct
SNGSTRGDRGYL

SEQ ID NO: 578 - protein, 12 aa, synthetic construct
SNGSTRGDRQAL

SEQ ID NO: 579 - protein, 12 aa, synthetic construct
SNGSTRGDRQSL

SEQ ID NO: 580 - protein, 12 aa, synthetic construct
SNGSTRGDRQYL

SEQ ID NO: 581 - protein, 12 aa, synthetic construct
SNGSVRGDRGYL

SEQ ID NO: 582 - protein, 12 aa, synthetic construct
SNGSVRGDRQAL

SEQ ID NO: 583 - protein, 12 aa, synthetic construct
SNGSVRGDRQSL

SEQ ID NO: 584 - protein, 12 aa, synthetic construct
SNGSVRGDRQYL

SEQ ID NO: 585 - protein, 12 aa, synthetic construct
SNSGMRGDRGAL

SEQ ID NO: 586 - protein, 12 aa, synthetic construct
SNSSARGDRAYL

SEQ ID NO: 587 - protein, 12 aa, synthetic construct
SNSSARGDRGAL

SEQ ID NO: 588 - protein, 12 aa, synthetic construct
SNSSARGDRGIL

SEQ ID NO: 589 - protein, 12 aa, synthetic construct
SNSSARGDRGSL

SEQ ID NO: 590 - protein, 12 aa, synthetic construct
SNSSARGDRGYL

SEQ ID NO: 591 - protein, 12 aa, synthetic construct
SNSSARGDRQAL

SEQ ID NO: 592 - protein, 12 aa, synthetic construct
SNSSARGDRQSL

SEQ ID NO: 593 - protein, 12 aa, synthetic construct
SNSSARGDRQYL

SEQ ID NO: 594 - protein, 12 aa, synthetic construct
SNSSGRGDRAAL

SEQ ID NO: 595 - protein, 12 aa, synthetic construct
SNSSGRGDRAYL

SEQ ID NO: 596 - protein, 12 aa, synthetic construct
SNSSGRGDRGAL

SEQ ID NO: 597 - protein, 12 aa, synthetic construct
SNSSGRGDRGSL

SEQ ID NO: 598 - protein, 12 aa, synthetic construct
SNSSGRGDRGYL

SEQ ID NO: 599 - protein, 12 aa, synthetic construct
SNSSGRGDRQAL

SEQ ID NO: 600 - protein, 12 aa, synthetic construct
SNSSGRGDRQSL

SEQ ID NO: 601 - protein, 12 aa, synthetic construct
SNSSGRGDRQYL

SEQ ID NO: 602 - protein, 12 aa, synthetic construct
SNSSMRGDRAAL

SEQ ID NO: 603 - protein, 12 aa, synthetic construct
SNSSMRGDRASL

SEQ ID NO: 604 - protein, 12 aa, synthetic construct
SNSSMRGDRAYL

SEQ ID NO: 605 - protein, 12 aa, synthetic construct
SNSSMRGDRGSL

SEQ ID NO: 606 - protein, 12 aa, synthetic construct
SNSSMRGDRQAL

SEQ ID NO: 607 - protein, 12 aa, synthetic construct
SNSSMRGDRQSL

SEQ ID NO: 608 - protein, 12 aa, synthetic construct
SNSSMRGDRQYL

SEQ ID NO: 609 - protein, 12 aa, synthetic construct
SNSSSRGDRAAL

SEQ ID NO: 610 - protein, 12 aa, synthetic construct
SNSSSRGDRGSL

SEQ ID NO: 611 - protein, 12 aa, synthetic construct
SNSSSRGDRQAL

SEQ ID NO: 612 - protein, 12 aa, synthetic construct
SNSSSRGDRQSL

SEQ ID NO: 613 - protein, 12 aa, synthetic construct
SNSSSRGDRQYL

SEQ ID NO: 614 - protein, 12 aa, synthetic construct
SNSSTRGDRAAL

SEQ ID NO: 615 - protein, 12 aa, synthetic construct
SNSSTRGDRASL

SEQ ID NO: 616 - protein, 12 aa, synthetic construct
SNSSTRGDRGSL

SEQ ID NO: 617 - protein, 12 aa, synthetic construct
SNSSTRGDRGYL

SEQ ID NO: 618 - protein, 12 aa, synthetic construct
SNSSTRGDRQAL

SEQ ID NO: 619 - protein, 12 aa, synthetic construct
SNSSTRGDRQSL

SEQ ID NO: 620 - protein, 12 aa, synthetic construct
SNSSTRGDRQYL

SEQ ID NO: 621 - protein, 12 aa, synthetic construct
SNSSVRGDRQAL

SEQ ID NO: 622 - protein, 12 aa, synthetic construct
SNSSVRGDRQSL

SEQ ID NO: 623 - protein, 12 aa, synthetic construct
SNSSVRGDRQYL

SEQ ID NO: 624 - protein, 12 aa, synthetic construct
SNTSARGDRAAL

SEQ ID NO: 625 - protein, 12 aa, synthetic construct
SNTSARGDRGAL

SEQ ID NO: 626 - protein, 12 aa, synthetic construct
SNTSARGDRGSL

SEQ ID NO: 627 - protein, 12 aa, synthetic construct
SNTSARGDRGYL

SEQ ID NO: 628 - protein, 12 aa, synthetic construct
SNTSARGDRQAL

SEQ ID NO: 629 - protein, 12 aa, synthetic construct
SNTSARGDRQSL

SEQ ID NO: 630 - protein, 12 aa, synthetic construct
SNTSARGDRQYL

SEQ ID NO: 631 - protein, 12 aa, synthetic construct
SNTSGRGDRAAL

SEQ ID NO: 632 - protein, 12 aa, synthetic construct
SNTSGRGDRASL

SEQ ID NO: 633 - protein, 12 aa, synthetic construct
SNTSGRGDRGAL

SEQ ID NO: 634 - protein, 12 aa, synthetic construct
SNTSGRGDRGSL

SEQ ID NO: 635 - protein, 12 aa, synthetic construct
SNTSGRGDRGYL

SEQ ID NO: 636 - protein, 12 aa, synthetic construct
SNTSGRGDRQAL

SEQ ID NO: 637 - protein, 12 aa, synthetic construct
SNTSGRGDRQSL

SEQ ID NO: 638 - protein, 12 aa, synthetic construct
SNTSGRGDRQYL

SEQ ID NO: 639 - protein, 12 aa, synthetic construct
SNTSMRGDRAYL

SEQ ID NO: 640 - protein, 12 aa, synthetic construct
SNTSMRGDRGSL

SEQ ID NO: 641 - protein, 12 aa, synthetic construct
SNTSMRGDRQAL

SEQ ID NO: 642 - protein, 12 aa, synthetic construct
SNTSMRGDRQSL

SEQ ID NO: 643 - protein, 12 aa, synthetic construct
SNTSSRGDRQAL

SEQ ID NO: 644 - protein, 12 aa, synthetic construct
SNTSTRGDRQAL

SEQ ID NO: 645 - protein, 12 aa, synthetic construct
SNTSTRGDRQSL

SEQ ID NO: 646 - protein, 12 aa, synthetic construct
SNTSTRGDRQYL

SEQ ID NO: 647 - protein, 12 aa, synthetic construct
SNTSVRGDRAYL

SEQ ID NO: 648 - protein, 12 aa, synthetic construct
SNTSVRGDRQAL

SEQ ID NO: 649 - protein, 12 aa, synthetic construct
SNTSVRGDRQSL

SEQ ID NO: 650 - protein, 12 aa, synthetic construct
SNTSVRGDRQYL

SEQ ID NO: 651 - protein, 12 aa, synthetic construct
SNYPHRGDRGAL

SEQ ID NO: 652 - protein, 12 aa, synthetic construct
SNYSARGDRAAL

SEQ ID NO: 653 - protein, 12 aa, synthetic construct
SNYSARGDRASL

SEQ ID NO: 654 - protein, 12 aa, synthetic construct
SNYSARGDRGAL

SEQ ID NO: 655 - protein, 12 aa, synthetic construct
SNYSARGDRGSL

SEQ ID NO: 656 - protein, 12 aa, synthetic construct
SNYSARGDRQAL

SEQ ID NO: 657 - protein, 12 aa, synthetic construct
SNYSARGDRQSL

SEQ ID NO: 658 - protein, 12 aa, synthetic construct
SNYSARGDRQYL

SEQ ID NO: 659 - protein, 12 aa, synthetic construct
SNYSGRGDRAAL

SEQ ID NO: 660 - protein, 12 aa, synthetic construct
SNYSGRGDRGAL

SEQ ID NO: 661 - protein, 12 aa, synthetic construct
SNYSGRGDRGSL

SEQ ID NO: 662 - protein, 12 aa, synthetic construct
SNYSGRGDRQAL

SEQ ID NO: 663 - protein, 12 aa, synthetic construct
SNYSGRGDRQSL

SEQ ID NO: 664 - protein, 12 aa, synthetic construct
SNYSMRGDRAAL

SEQ ID NO: 665 - protein, 12 aa, synthetic construct
SNYSMRGDRASL

SEQ ID NO: 666 - protein, 12 aa, synthetic construct
SNYSMRGDRGSL

SEQ ID NO: 667 - protein, 12 aa, synthetic construct
SNYSMRGDRQAL

SEQ ID NO: 668 - protein, 12 aa, synthetic construct
SNYSMRGDRQSL

SEQ ID NO: 669 - protein, 12 aa, synthetic construct
SNYSSRGDRGAL

SEQ ID NO: 670 - protein, 12 aa, synthetic construct
SNYSSRGDRGSL

SEQ ID NO: 671 - protein, 12 aa, synthetic construct
SNYSSRGDRQAL

SEQ ID NO: 672 - protein, 12 aa, synthetic construct
SNYSSRGDRQSL

SEQ ID NO: 673 - protein, 12 aa, synthetic construct
SNYSTRGDRAAL

SEQ ID NO: 674 - protein, 12 aa, synthetic construct
SNYSTRGDRGAL

SEQ ID NO: 675 - protein, 12 aa, synthetic construct
SNYSTRGDRGSL

SEQ ID NO: 676 - protein, 12 aa, synthetic construct
SNYSTRGDRQAL

SEQ ID NO: 677 - protein, 12 aa, synthetic construct
SNYSTRGDRQSL

SEQ ID NO: 678 - protein, 12 aa, synthetic construct
SNYSTRGDRQYL

SEQ ID NO: 679 - protein, 12 aa, synthetic construct
SNYSVRGDRQAL

SEQ ID NO: 680 - protein, 12 aa, synthetic construct
SNYSVRGDRQSL

SEQ ID NO: 681 - protein, 12 aa, synthetic construct
SNYSVRGDRQYL

SEQ ID NO: 682 - protein, 12 aa, synthetic construct
TNSGMRGDRGAL

SEQ ID NO: 683 - protein, 12 aa, synthetic construct
VNASARGDRAAL

SEQ ID NO: 684 - protein, 12 aa, synthetic construct
VNASARGDRGAL

SEQ ID NO: 685 - protein, 12 aa, synthetic construct
VNASARGDRGSL

SEQ ID NO: 686 - protein, 12 aa, synthetic construct
VNASARGDRGYL

SEQ ID NO: 687 - protein, 12 aa, synthetic construct
VNASARGDRQAL

SEQ ID NO: 688 - protein, 12 aa, synthetic construct
VNASARGDRQYL

SEQ ID NO: 689 - protein, 12 aa, synthetic construct
VNASGRGDRAAL

SEQ ID NO: 690 - protein, 12 aa, synthetic construct
VNASGRGDRAYL

SEQ ID NO: 691 - protein, 12 aa, synthetic construct
VNASGRGDRGAL

SEQ ID NO: 692 - protein, 12 aa, synthetic construct
VNASGRGDRGSL

SEQ ID NO: 693 - protein, 12 aa, synthetic construct
VNASGRGDRGYL

SEQ ID NO: 694 - protein, 12 aa, synthetic construct
VNASGRGDRQAL

SEQ ID NO: 695 - protein, 12 aa, synthetic construct
VNASGRGDRQYL

SEQ ID NO: 696 - protein, 12 aa, synthetic construct
VNASMRGDRAYL

SEQ ID NO: 697 - protein, 12 aa, synthetic construct
VNASMRGDRQAL

SEQ ID NO: 698 - protein, 12 aa, synthetic construct
VNASMRGDRQSL

SEQ ID NO: 699 - protein, 12 aa, synthetic construct
VNASSRGDRGSL

SEQ ID NO: 700 - protein, 12 aa, synthetic construct
VNASSRGDRQAL

SEQ ID NO: 701 - protein, 12 aa, synthetic construct
VNASSRGDRQYL

SEQ ID NO: 702 - protein, 12 aa, synthetic construct
VNASTRGDRAAL

SEQ ID NO: 703 - protein, 12 aa, synthetic construct
VNASTRGDRGAL

SEQ ID NO: 704 - protein, 12 aa, synthetic construct
VNASTRGDRGSL

SEQ ID NO: 705 - protein, 12 aa, synthetic construct
VNASTRGDRGYL

SEQ ID NO: 706 - protein, 12 aa, synthetic construct
VNASTRGDRQAL

SEQ ID NO: 707 - protein, 12 aa, synthetic construct
VNASTRGDRQSL

SEQ ID NO: 708 - protein, 12 aa, synthetic construct
VNASTRGDRQYL

SEQ ID NO: 709 - protein, 12 aa, synthetic construct
VNASVRGDRGSL

SEQ ID NO: 710 - protein, 12 aa, synthetic construct
VNASVRGDRGYL

SEQ ID NO: 711 - protein, 12 aa, synthetic construct
VNASVRGDRQAL

SEQ ID NO: 712 - protein, 12 aa, synthetic construct
VNASVRGDRQSL

SEQ ID NO: 713 - protein, 12 aa, synthetic construct
VNASVRGDRQYL

SEQ ID NO: 714 - protein, 12 aa, synthetic construct
VNGNFRGDRQNL

SEQ ID NO: 715 - protein, 12 aa, synthetic construct
VNGNVRGDRGML

SEQ ID NO: 716 - protein, 12 aa, synthetic construct
VNGSARGDRAYL

SEQ ID NO: 717 - protein, 12 aa, synthetic construct
VNGSARGDRGAL

SEQ ID NO: 718 - protein, 12 aa, synthetic construct
VNGSARGDRGSL

SEQ ID NO: 719 - protein, 12 aa, synthetic construct
VNGSARGDRGYL

SEQ ID NO: 720 - protein, 12 aa, synthetic construct
VNGSARGDRQAL

SEQ ID NO: 721 - protein, 12 aa, synthetic construct
VNGSARGDRQSL

SEQ ID NO: 722 - protein, 12 aa, synthetic construct
VNGSARGDRQYL

SEQ ID NO: 723 - protein, 12 aa, synthetic construct
VNGSGRGDRAAL

SEQ ID NO: 724 - protein, 12 aa, synthetic construct
VNGSGRGDRASL

SEQ ID NO: 725 - protein, 12 aa, synthetic construct
VNGSGRGDRAYL

SEQ ID NO: 726 - protein, 12 aa, synthetic construct
VNGSGRGDRGAL

SEQ ID NO: 727 - protein, 12 aa, synthetic construct
VNGSGRGDRGSL

SEQ ID NO: 728 - protein, 12 aa, synthetic construct
VNGSGRGDRGYL

SEQ ID NO: 729 - protein, 12 aa, synthetic construct
VNGSGRGDRQAL

SEQ ID NO: 730 - protein, 12 aa, synthetic construct
VNGSGRGDRQSL

SEQ ID NO: 731 - protein, 12 aa, synthetic construct
VNGSGRGDRQYL

SEQ ID NO: 732 - protein, 12 aa, synthetic construct
VNGSMRGDRGYL

SEQ ID NO: 733 - protein, 12 aa, synthetic construct
VNGSMRGDRQAL

SEQ ID NO: 734 - protein, 12 aa, synthetic construct
VNGSMRGDRQSL

SEQ ID NO: 735 - protein, 12 aa, synthetic construct
VNGSMRGDRQYL

SEQ ID NO: 736 - protein, 12 aa, synthetic construct
VNGSSRGDRAYL

SEQ ID NO: 737 - protein, 12 aa, synthetic construct
VNGSSRGDRGAL

SEQ ID NO: 738 - protein, 12 aa, synthetic construct
VNGSSRGDRGSL

SEQ ID NO: 739 - protein, 12 aa, synthetic construct
VNGSSRGDRQAL

SEQ ID NO: 740 - protein, 12 aa, synthetic construct
VNGSSRGDRQSL

SEQ ID NO: 741 - protein, 12 aa, synthetic construct
VNGSSRGDRQYL

SEQ ID NO: 742 - protein, 12 aa, synthetic construct
VNGSTRGDRAAL

SEQ ID NO: 743 - protein, 12 aa, synthetic construct
VNGSTRGDRAYL

SEQ ID NO: 744 - protein, 12 aa, synthetic construct
VNGSTRGDRGAL

SEQ ID NO: 745 - protein, 12 aa, synthetic construct
VNGSTRGDRGYL

SEQ ID NO: 746 - protein, 12 aa, synthetic construct
VNGSTRGDRQAL

SEQ ID NO: 747 - protein, 12 aa, synthetic construct
VNGSTRGDRQSL

SEQ ID NO: 748 - protein, 12 aa, synthetic construct
VNGSTRGDRQYL

SEQ ID NO: 749 - protein, 12 aa, synthetic construct
VNGSVRGDRAYL

SEQ ID NO: 750 - protein, 12 aa, synthetic construct
VNGSVRGDRQAL

SEQ ID NO: 751 - protein, 12 aa, synthetic construct
VNGSVRGDRQSL

SEQ ID NO: 752 - protein, 12 aa, synthetic construct
VNGSVRGDRQYL

SEQ ID NO: 753 - protein, 12 aa, synthetic construct
VNSGMRGDRGAL

SEQ ID NO: 754 - protein, 12 aa, synthetic construct
VNSSARGDRGAL

SEQ ID NO: 755 - protein, 12 aa, synthetic construct
VNSSARGDRGSL

SEQ ID NO: 756 - protein, 12 aa, synthetic construct
VNSSARGDRGYL

SEQ ID NO: 757 - protein, 12 aa, synthetic construct
VNSSARGDRQAL

SEQ ID NO: 758 - protein, 12 aa, synthetic construct
VNSSARGDRQSL

SEQ ID NO: 759 - protein, 12 aa, synthetic construct
VNSSARGDRQYL

SEQ ID NO: 760 - protein, 12 aa, synthetic construct
VNSSGRGDRAAL

SEQ ID NO: 761 - protein, 12 aa, synthetic construct
VNSSGRGDRAYL

SEQ ID NO: 762 - protein, 12 aa, synthetic construct
VNSSGRGDRGAL

SEQ ID NO: 763 - protein, 12 aa, synthetic construct
VNSSGRGDRQAL

SEQ ID NO: 764 - protein, 12 aa, synthetic construct
VNSSGRGDRQSL

SEQ ID NO: 765 - protein, 12 aa, synthetic construct
VNSSGRGDRQYL

SEQ ID NO: 766 - protein, 12 aa, synthetic construct
VNSSMRGDRAYL

SEQ ID NO: 767 - protein, 12 aa, synthetic construct
VNSSMRGDRQAL

SEQ ID NO: 768 - protein, 12 aa, synthetic construct
VNSSMRGDRQSL

SEQ ID NO: 769 - protein, 12 aa, synthetic construct
VNSSMRGDRQYL

SEQ ID NO: 770 - protein, 12 aa, synthetic construct
VNSSSRGDRGSL

SEQ ID NO: 771 - protein, 12 aa, synthetic construct
VNSSSRGDRQAL

SEQ ID NO: 772 - protein, 12 aa, synthetic construct
VNSSSRGDRQSL

SEQ ID NO: 773 - protein, 12 aa, synthetic construct
VNSSTRGDRGAL

SEQ ID NO: 774 - protein, 12 aa, synthetic construct
VNSSTRGDRQAL

SEQ ID NO: 775 - protein, 12 aa, synthetic construct
VNSSTRGDRQSL

SEQ ID NO: 776 - protein, 12 aa, synthetic construct
VNSSTRGDRQYL

SEQ ID NO: 777 - protein, 12 aa, synthetic construct
VNSSVRGDRAYL

SEQ ID NO: 778 - protein, 12 aa, synthetic construct
VNSSVRGDRQAL

SEQ ID NO: 779 - protein, 12 aa, synthetic construct
VNSSVRGDRQSL

SEQ ID NO: 780 - protein, 12 aa, synthetic construct
VNTSARGDRAYL

SEQ ID NO: 781 - protein, 12 aa, synthetic construct
VNTSGRGDRAAL

SEQ ID NO: 782 - protein, 12 aa, synthetic construct
VNTSGRGDRGAL

SEQ ID NO: 783 - protein, 12 aa, synthetic construct
VNTSGRGDRGSL

SEQ ID NO: 784 - protein, 12 aa, synthetic construct
VNTSGRGDRGYL

SEQ ID NO: 785 - protein, 12 aa, synthetic construct
VNTSGRGDRQAL

SEQ ID NO: 786 - protein, 12 aa, synthetic construct
VNTSGRGDRQSL

SEQ ID NO: 787 - protein, 12 aa, synthetic construct
VNTSGRGDRQYL

SEQ ID NO: 788 - protein, 12 aa, synthetic construct
VNTSTRGDRAYL

SEQ ID NO: 789 - protein, 12 aa, synthetic construct
VNYPHRGDRGAL

SEQ ID NO: 790 - protein, 12 aa, synthetic construct
VNYSARGDRGAL

SEQ ID NO: 791 - protein, 12 aa, synthetic construct
VNYSARGDRGSL

SEQ ID NO: 792 - protein, 12 aa, synthetic construct
VNYSARGDRQAL

SEQ ID NO: 793 - protein, 12 aa, synthetic construct
VNYSARGDRQSL

SEQ ID NO: 794 - protein, 12 aa, synthetic construct
VNYSGRGDRAAL

SEQ ID NO: 795 - protein, 12 aa, synthetic construct
VNYSGRGDRGAL

SEQ ID NO: 796 - protein, 12 aa, synthetic construct
VNYSGRGDRQAL

SEQ ID NO: 797 - protein, 12 aa, synthetic construct
VNYSGRGDRQSL

SEQ ID NO: 798 - protein, 12 aa, synthetic construct
VNYSGRGDRQYL

SEQ ID NO: 799 - protein, 12 aa, synthetic construct
VNYSSRGDRGSL

SEQ ID NO: 800 - protein, 12 aa, synthetic construct
VNYSSRGDRGYL

SEQ ID NO: 801 - protein, 5 aa, synthetic construct
ANASA

SEQ ID NO: 802 - protein, 5 aa, synthetic construct
ANASA

SEQ ID NO: 803 - protein, 5 aa, synthetic construct
ANASA

SEQ ID NO: 804 - protein, 5 aa, synthetic construct
ANASA

SEQ ID NO: 805 - protein, 5 aa, synthetic construct
ANASA

SEQ ID NO: 806 - protein, 5 aa, synthetic construct
ANASA

SEQ ID NO: 807 - protein, 5 aa, synthetic construct
ANASG

SEQ ID NO: 808 - protein, 5 aa, synthetic construct
ANASG

SEQ ID NO: 809 - protein, 5 aa, synthetic construct
ANASG

SEQ ID NO: 810 - protein, 5 aa, synthetic construct
ANASG

SEQ ID NO: 811 - protein, 5 aa, synthetic construct
ANASG

SEQ ID NO: 812 - protein, 5 aa, synthetic construct
ANASG

SEQ ID NO: 813 - protein, 5 aa, synthetic construct
ANASG

SEQ ID NO: 814 - protein, 5 aa, synthetic construct
ANASG

SEQ ID NO: 815 - protein, 5 aa, synthetic construct
ANASG

SEQ ID NO: 816 - protein, 5 aa, synthetic construct
ANASM

SEQ ID NO: 817 - protein, 5 aa, synthetic construct
ANASM

SEQ ID NO: 818 - protein, 5 aa, synthetic construct
ANASM

SEQ ID NO: 819 - protein, 5 aa, synthetic construct
ANASM

SEQ ID NO: 820 - protein, 5 aa, synthetic construct
ANASM

SEQ ID NO: 821 - protein, 5 aa, synthetic construct
ANASS

SEQ ID NO: 822 - protein, 5 aa, synthetic construct
ANASS

SEQ ID NO: 823 - protein, 5 aa, synthetic construct
ANASS

SEQ ID NO: 824 - protein, 5 aa, synthetic construct
ANASS

SEQ ID NO: 825 - protein, 5 aa, synthetic construct
ANASS

SEQ ID NO: 826 - protein, 5 aa, synthetic construct
ANAST

SEQ ID NO: 827 - protein, 5 aa, synthetic construct
ANAST

SEQ ID NO: 828 - protein, 5 aa, synthetic construct
ANAST

SEQ ID NO: 829 - protein, 5 aa, synthetic construct
ANAST

SEQ ID NO: 830 - protein, 5 aa, synthetic construct
ANAST

SEQ ID NO: 831 - protein, 5 aa, synthetic construct
ANAST

SEQ ID NO: 832 - protein, 5 aa, synthetic construct
ANAST

SEQ ID NO: 833 - protein, 5 aa, synthetic construct
ANAST

SEQ ID NO: 834 - protein, 5 aa, synthetic construct
ANASV

SEQ ID NO: 835 - protein, 5 aa, synthetic construct
ANASV

SEQ ID NO: 836 - protein, 5 aa, synthetic construct
ANASV

SEQ ID NO: 837 - protein, 5 aa, synthetic construct
ANASV

SEQ ID NO: 838 - protein, 5 aa, synthetic construct
ANASV

SEQ ID NO: 839 - protein, 5 aa, synthetic construct
ANGNF

SEQ ID NO: 840 - protein, 5 aa, synthetic construct
ANGNV

SEQ ID NO: 841 - protein, 5 aa, synthetic construct
ANGSA

SEQ ID NO: 842 - protein, 5 aa, synthetic construct
ANGSA

SEQ ID NO: 843 - protein, 5 aa, synthetic construct
ANGSA

SEQ ID NO: 844 - protein, 5 aa, synthetic construct
ANGSA

SEQ ID NO: 845 - protein, 5 aa, synthetic construct
ANGSA

SEQ ID NO: 846 - protein, 5 aa, synthetic construct
ANGSG

SEQ ID NO: 847 - protein, 5 aa, synthetic construct
ANGSG

SEQ ID NO: 848 - protein, 5 aa, synthetic construct
ANGSG

SEQ ID NO: 849 - protein, 5 aa, synthetic construct
ANGSG

SEQ ID NO: 850 - protein, 5 aa, synthetic construct
ANGSG

SEQ ID NO: 851 - protein, 5 aa, synthetic construct
ANGSG

SEQ ID NO: 852 - protein, 5 aa, synthetic construct
ANGSG

SEQ ID NO: 853 - protein, 5 aa, synthetic construct
ANGSG

SEQ ID NO: 854 - protein, 5 aa, synthetic construct
ANGSM

SEQ ID NO: 855 - protein, 5 aa, synthetic construct
ANGSM

SEQ ID NO: 856 - protein, 5 aa, synthetic construct
ANGSM

SEQ ID NO: 857 - protein, 5 aa, synthetic construct
ANGSM

SEQ ID NO: 858 - protein, 5 aa, synthetic construct
ANGSS

SEQ ID NO: 859 - protein, 5 aa, synthetic construct
ANGSS

SEQ ID NO: 860 - protein, 5 aa, synthetic construct
ANGSS

SEQ ID NO: 861 - protein, 5 aa, synthetic construct
ANGSS

SEQ ID NO: 862 - protein, 5 aa, synthetic construct
ANGSS

SEQ ID NO: 863 - protein, 5 aa, synthetic construct
ANGSS

SEQ ID NO: 864 - protein, 5 aa, synthetic construct
ANGST

SEQ ID NO: 865 - protein, 5 aa, synthetic construct
ANGST

SEQ ID NO: 866 - protein, 5 aa, synthetic construct
ANGST

SEQ ID NO: 867 - protein, 5 aa, synthetic construct
ANGST

SEQ ID NO: 868 - protein, 5 aa, synthetic construct
ANGST

SEQ ID NO: 869 - protein, 5 aa, synthetic construct
ANGST

SEQ ID NO: 870 - protein, 5 aa, synthetic construct
ANGST

SEQ ID NO: 871 - protein, 5 aa, synthetic construct
ANGSV

SEQ ID NO: 872 - protein, 5 aa, synthetic construct
ANGSV

SEQ ID NO: 873 - protein, 5 aa, synthetic construct
ANGSV

SEQ ID NO: 874 - protein, 5 aa, synthetic construct
ANGSV

SEQ ID NO: 875 - protein, 5 aa, synthetic construct
ANSGM

SEQ ID NO: 876 - protein, 5 aa, synthetic construct
ANSSA

SEQ ID NO: 877 - protein, 5 aa, synthetic construct
ANSSA

SEQ ID NO: 878 - protein, 5 aa, synthetic construct
ANSSA

SEQ ID NO: 879 - protein, 5 aa, synthetic construct
ANSSA

SEQ ID NO: 880 - protein, 5 aa, synthetic construct
ANSSA

SEQ ID NO: 881 - protein, 5 aa, synthetic construct
ANSSA

SEQ ID NO: 882 - protein, 5 aa, synthetic construct
ANSSG

SEQ ID NO: 883 - protein, 5 aa, synthetic construct
ANSSG

SEQ ID NO: 884 - protein, 5 aa, synthetic construct
ANSSG

SEQ ID NO: 885 - protein, 5 aa, synthetic construct
ANSSG

SEQ ID NO: 886 - protein, 5 aa, synthetic construct
ANSSG

SEQ ID NO: 887 - protein, 5 aa, synthetic construct
ANSSG

SEQ ID NO: 888 - protein, 5 aa, synthetic construct
ANSSG

SEQ ID NO: 889 - protein, 5 aa, synthetic construct
ANSSG

SEQ ID NO: 890 - protein, 5 aa, synthetic construct
ANSSG

SEQ ID NO: 891 - protein, 5 aa, synthetic construct
ANSSM

SEQ ID NO: 892 - protein, 5 aa, synthetic construct
ANSSM

SEQ ID NO: 893 - protein, 5 aa, synthetic construct
ANSSM

SEQ ID NO: 894 - protein, 5 aa, synthetic construct
ANSSM

SEQ ID NO: 895 - protein, 5 aa, synthetic construct
ANSSS

SEQ ID NO: 896 - protein, 5 aa, synthetic construct
ANSSS

SEQ ID NO: 897 - protein, 5 aa, synthetic construct
ANSSS

SEQ ID NO: 898 - protein, 5 aa, synthetic construct
ANSSS

SEQ ID NO: 899 - protein, 5 aa, synthetic construct
ANSSS

SEQ ID NO: 900 - protein, 5 aa, synthetic construct
ANSST

SEQ ID NO: 901 - protein, 5 aa, synthetic construct
ANSST

SEQ ID NO: 902 - protein, 5 aa, synthetic construct
ANSST

SEQ ID NO: 903 - protein, 5 aa, synthetic construct
ANSST

SEQ ID NO: 904 - protein, 5 aa, synthetic construct
ANSST

SEQ ID NO: 905 - protein, 5 aa, synthetic construct
ANSSV

SEQ ID NO: 906 - protein, 5 aa, synthetic construct
ANSSV

SEQ ID NO: 907 - protein, 5 aa, synthetic construct
ANSSV

SEQ ID NO: 908 - protein, 5 aa, synthetic construct
ANSSV

SEQ ID NO: 909 - protein, 5 aa, synthetic construct
ANSSV

SEQ ID NO: 910 - protein, 5 aa, synthetic construct
ANTSA

SEQ ID NO: 911 - protein, 5 aa, synthetic construct
ANTSA

SEQ ID NO: 912 - protein, 5 aa, synthetic construct
ANTSA

SEQ ID NO: 913 - protein, 5 aa, synthetic construct
ANTSA

SEQ ID NO: 914 - protein, 5 aa, synthetic construct
ANTSA

SEQ ID NO: 915 - protein, 5 aa, synthetic construct
ANTSA

SEQ ID NO: 916 - protein, 5 aa, synthetic construct
ANTSG

SEQ ID NO: 917 - protein, 5 aa, synthetic construct
ANTSG

SEQ ID NO: 918 - protein, 5 aa, synthetic construct
ANTSG

SEQ ID NO: 919 - protein, 5 aa, synthetic construct
ANTSG

SEQ ID NO: 920 - protein, 5 aa, synthetic construct
ANTSG

SEQ ID NO: 921 - protein, 5 aa, synthetic construct
ANTSG

SEQ ID NO: 922 - protein, 5 aa, synthetic construct
ANTSG

SEQ ID NO: 923 - protein, 5 aa, synthetic construct
ANTSM

SEQ ID NO: 924 - protein, 5 aa, synthetic construct
ANTSM

SEQ ID NO: 925 - protein, 5 aa, synthetic construct
ANTSM

SEQ ID NO: 926 - protein, 5 aa, synthetic construct
ANTSM

SEQ ID NO: 927 - protein, 5 aa, synthetic construct
ANTSS

SEQ ID NO: 928 - protein, 5 aa, synthetic construct
ANTSS

SEQ ID NO: 929 - protein, 5 aa, synthetic construct
ANTSS

SEQ ID NO: 930 - protein, 5 aa, synthetic construct
ANTST

SEQ ID NO: 931 - protein, 5 aa, synthetic construct
ANTST

SEQ ID NO: 932 - protein, 5 aa, synthetic construct
ANTST

SEQ ID NO: 933 - protein, 5 aa, synthetic construct
ANTST

SEQ ID NO: 934 - protein, 5 aa, synthetic construct
ANTSV

SEQ ID NO: 935 - protein, 5 aa, synthetic construct
ANTSV

SEQ ID NO: 936 - protein, 5 aa, synthetic construct
ANTSV

SEQ ID NO: 937 - protein, 5 aa, synthetic construct
ANTSV

SEQ ID NO: 938 - protein, 5 aa, synthetic construct
ANTSV

SEQ ID NO: 939 - protein, 5 aa, synthetic construct
ANYPH

SEQ ID NO: 940 - protein, 5 aa, synthetic construct
ANYSA

SEQ ID NO: 941 - protein, 5 aa, synthetic construct
ANYSA

SEQ ID NO: 942 - protein, 5 aa, synthetic construct
ANYSA

SEQ ID NO: 943 - protein, 5 aa, synthetic construct
ANYSA

SEQ ID NO: 944 - protein, 5 aa, synthetic construct
ANYSA

SEQ ID NO: 945 - protein, 5 aa, synthetic construct
ANYSA

SEQ ID NO: 946 - protein, 5 aa, synthetic construct
ANYSG

SEQ ID NO: 947 - protein, 5 aa, synthetic construct
ANYSG

SEQ ID NO: 948 - protein, 5 aa, synthetic construct
ANYSG

SEQ ID NO: 949 - protein, 5 aa, synthetic construct
ANYSG

SEQ ID NO: 950 - protein, 5 aa, synthetic construct
ANYSG

SEQ ID NO: 951 - protein, 5 aa, synthetic construct
ANYSG

SEQ ID NO: 952 - protein, 5 aa, synthetic construct
ANYSG

SEQ ID NO: 953 - protein, 5 aa, synthetic construct
ANYSM

SEQ ID NO: 954 - protein, 5 aa, synthetic construct
ANYSM

SEQ ID NO: 955 - protein, 5 aa, synthetic construct
ANYSM

SEQ ID NO: 956 - protein, 5 aa, synthetic construct
ANYSM

SEQ ID NO: 957 - protein, 5 aa, synthetic construct
ANYSM

SEQ ID NO: 958 - protein, 5 aa, synthetic construct
ANYSS

SEQ ID NO: 959 - protein, 5 aa, synthetic construct
ANYSS

SEQ ID NO: 960 - protein, 5 aa, synthetic construct
ANYSS

SEQ ID NO: 961 - protein, 5 aa, synthetic construct
ANYSS

SEQ ID NO: 962 - protein, 5 aa, synthetic construct
ANYSS

SEQ ID NO: 963 - protein, 5 aa, synthetic construct
ANYST

SEQ ID NO: 964 - protein, 5 aa, synthetic construct
ANYST

SEQ ID NO: 965 - protein, 5 aa, synthetic construct
ANYST

SEQ ID NO: 966 - protein, 5 aa, synthetic construct
ANYSV

SEQ ID NO: 967 - protein, 5 aa, synthetic construct
ANYSV

SEQ ID NO: 968 - protein, 5 aa, synthetic construct
ANYSV

SEQ ID NO: 969 - protein, 5 aa, synthetic construct
FNSGM

SEQ ID NO: 970 - protein, 5 aa, synthetic construct
GNSGM

SEQ ID NO: 971 - protein, 5 aa, synthetic construct
HNSGM

SEQ ID NO: 972 - protein, 5 aa, synthetic construct
LNASA

SEQ ID NO: 973 - protein, 5 aa, synthetic construct
LNASA

SEQ ID NO: 974 - protein, 5 aa, synthetic construct
LNASA

SEQ ID NO: 975 - protein, 5 aa, synthetic construct
LNASA

SEQ ID NO: 976 - protein, 5 aa, synthetic construct
LNASA

SEQ ID NO: 977 - protein, 5 aa, synthetic construct
LNASA

SEQ ID NO: 978 - protein, 5 aa, synthetic construct
LNASA

SEQ ID NO: 979 - protein, 5 aa, synthetic construct
LNASA

SEQ ID NO: 980 - protein, 5 aa, synthetic construct
LNASA

SEQ ID NO: 981 - protein, 5 aa, synthetic construct
LNASG

SEQ ID NO: 982 - protein, 5 aa, synthetic construct
LNASG

SEQ ID NO: 983 - protein, 5 aa, synthetic construct
LNASG

SEQ ID NO: 984 - protein, 5 aa, synthetic construct
LNASG

SEQ ID NO: 985 - protein, 5 aa, synthetic construct
LNASG

SEQ ID NO: 986 - protein, 5 aa, synthetic construct
LNASG

SEQ ID NO: 987 - protein, 5 aa, synthetic construct
LNASG

SEQ ID NO: 988 - protein, 5 aa, synthetic construct
LNASG

SEQ ID NO: 989 - protein, 5 aa, synthetic construct
LNASG

SEQ ID NO: 990 - protein, 5 aa, synthetic construct
LNASI

SEQ ID NO: 991 - protein, 5 aa, synthetic construct
LNASM

SEQ ID NO: 992 - protein, 5 aa, synthetic construct
LNASM

SEQ ID NO: 993 - protein, 5 aa, synthetic construct
LNASM

SEQ ID NO: 994 - protein, 5 aa, synthetic construct
LNASM

SEQ ID NO: 995 - protein, 5 aa, synthetic construct
LNASM

SEQ ID NO: 996 - protein, 5 aa, synthetic construct
LNASM

SEQ ID NO: 997 - protein, 5 aa, synthetic construct
LNASM

SEQ ID NO: 998 - protein, 5 aa, synthetic construct
LNASM

SEQ ID NO: 999 - protein, 5 aa, synthetic construct
LNASM

SEQ ID NO: 1000 - protein, 5 aa, synthetic construct
LNASS

SEQ ID NO: 1001 - protein, 5 aa, synthetic construct
LNASS

SEQ ID NO: 1002 - protein, 5 aa, synthetic construct
LNASS

SEQ ID NO: 1003 - protein, 5 aa, synthetic construct
LNASS

SEQ ID NO: 1004 - protein, 5 aa, synthetic construct
LNASS

SEQ ID NO: 1005 - protein, 5 aa, synthetic construct
LNASS

SEQ ID NO: 1006 - protein, 5 aa, synthetic construct
LNASS

SEQ ID NO: 1007 - protein, 5 aa, synthetic construct
LNAST

SEQ ID NO: 1008 - protein, 5 aa, synthetic construct
LNAST

SEQ ID NO: 1009 - protein, 5 aa, synthetic construct
LNAST

SEQ ID NO: 1010 - protein, 5 aa, synthetic construct
LNAST

SEQ ID NO: 1011 - protein, 5 aa, synthetic construct
LNAST

SEQ ID NO: 1012 - protein, 5 aa, synthetic construct
LNAST

SEQ ID NO: 1013 - protein, 5 aa, synthetic construct
LNAST

SEQ ID NO: 1014 - protein, 5 aa, synthetic construct
LNAST

SEQ ID NO: 1015 - protein, 5 aa, synthetic construct
LNASV

SEQ ID NO: 1016 - protein, 5 aa, synthetic construct
LNASV

SEQ ID NO: 1017 - protein, 5 aa, synthetic construct
LNASV

SEQ ID NO: 1018 - protein, 5 aa, synthetic construct
LNASV

SEQ ID NO: 1019 - protein, 5 aa, synthetic construct
LNASV

SEQ ID NO: 1020 - protein, 5 aa, synthetic construct
LNASV

SEQ ID NO: 1021 - protein, 5 aa, synthetic construct
LNASV

SEQ ID NO: 1022 - protein, 5 aa, synthetic construct
LNGNF

SEQ ID NO: 1023 - protein, 5 aa, synthetic construct
LNGNV

SEQ ID NO: 1024 - protein, 5 aa, synthetic construct
LNGSA

SEQ ID NO: 1025 - protein, 5 aa, synthetic construct
LNGSA

SEQ ID NO: 1026 - protein, 5 aa, synthetic construct
LNGSA

SEQ ID NO: 1027 - protein, 5 aa, synthetic construct
LNGSA

SEQ ID NO: 1028 - protein, 5 aa, synthetic construct
LNGSA

SEQ ID NO: 1029 - protein, 5 aa, synthetic construct
LNGSA

SEQ ID NO: 1030 - protein, 5 aa, synthetic construct
LNGSA

SEQ ID NO: 1031 - protein, 5 aa, synthetic construct
LNGSG

SEQ ID NO: 1032 - protein, 5 aa, synthetic construct
LNGSG

SEQ ID NO: 1033 - protein, 5 aa, synthetic construct
LNGSG

SEQ ID NO: 1034 - protein, 5 aa, synthetic construct
LNGSG

SEQ ID NO: 1035 - protein, 5 aa, synthetic construct
LNGSG

SEQ ID NO: 1036 - protein, 5 aa, synthetic construct
LNGSG

SEQ ID NO: 1037 - protein, 5 aa, synthetic construct
LNGSG

SEQ ID NO: 1038 - protein, 5 aa, synthetic construct
LNGSM

SEQ ID NO: 1039 - protein, 5 aa, synthetic construct
LNGSM

SEQ ID NO: 1040 - protein, 5 aa, synthetic construct
LNGSM

SEQ ID NO: 1041 - protein, 5 aa, synthetic construct
LNGSM

SEQ ID NO: 1042 - protein, 5 aa, synthetic construct
LNGSM

SEQ ID NO: 1043 - protein, 5 aa, synthetic construct
LNGSS

SEQ ID NO: 1044 - protein, 5 aa, synthetic construct
LNGSS

SEQ ID NO: 1045 - protein, 5 aa, synthetic construct
LNGSS

SEQ ID NO: 1046 - protein, 5 aa, synthetic construct
LNGSS

SEQ ID NO: 1047 - protein, 5 aa, synthetic construct
LNGST

SEQ ID NO: 1048 - protein, 5 aa, synthetic construct
LNGST

SEQ ID NO: 1049 - protein, 5 aa, synthetic construct
LNGST

SEQ ID NO: 1050 - protein, 5 aa, synthetic construct
LNGST

SEQ ID NO: 1051 - protein, 5 aa, synthetic construct
LNGST

SEQ ID NO: 1052 - protein, 5 aa, synthetic construct
LNGST

SEQ ID NO: 1053 - protein, 5 aa, synthetic construct
LNGST

SEQ ID NO: 1054 - protein, 5 aa, synthetic construct
LNGST

SEQ ID NO: 1055 - protein, 5 aa, synthetic construct
LNGST

SEQ ID NO: 1056 - protein, 5 aa, synthetic construct
LNGSV

SEQ ID NO: 1057 - protein, 5 aa, synthetic construct
LNGSV

SEQ ID NO: 1058 - protein, 5 aa, synthetic construct
LNGSV

SEQ ID NO: 1059 - protein, 5 aa, synthetic construct
LNGSV

SEQ ID NO: 1060 - protein, 5 aa, synthetic construct
LNGSV

SEQ ID NO: 1061 - protein, 5 aa, synthetic construct
LNGSV

SEQ ID NO: 1062 - protein, 5 aa, synthetic construct
LNSGM

SEQ ID NO: 1063 - protein, 5 aa, synthetic construct
LNSSA

SEQ ID NO: 1064 - protein, 5 aa, synthetic construct
LNSSA

SEQ ID NO: 1065 - protein, 5 aa, synthetic construct
LNSSA

SEQ ID NO: 1066 - protein, 5 aa, synthetic construct
LNSSA

SEQ ID NO: 1067 - protein, 5 aa, synthetic construct
LNSSA

SEQ ID NO: 1068 - protein, 5 aa, synthetic construct
LNSSA

SEQ ID NO: 1069 - protein, 5 aa, synthetic construct
LNSSA

SEQ ID NO: 1070 - protein, 5 aa, synthetic construct
LNSSA

SEQ ID NO: 1071 - protein, 5 aa, synthetic construct
LNSSA

SEQ ID NO: 1072 - protein, 5 aa, synthetic construct
LNSSG

SEQ ID NO: 1073 - protein, 5 aa, synthetic construct
LNSSG

SEQ ID NO: 1074 - protein, 5 aa, synthetic construct
LNSSG

SEQ ID NO: 1075 - protein, 5 aa, synthetic construct
LNSSG

SEQ ID NO: 1076 - protein, 5 aa, synthetic construct
LNSSG

SEQ ID NO: 1077 - protein, 5 aa, synthetic construct
LNSSG

SEQ ID NO: 1078 - protein, 5 aa, synthetic construct
LNSSG

SEQ ID NO: 1079 - protein, 5 aa, synthetic construct
LNSSG

SEQ ID NO: 1080 - protein, 5 aa, synthetic construct
LNSSG

SEQ ID NO: 1081 - protein, 5 aa, synthetic construct
LNSSM

SEQ ID NO: 1082 - protein, 5 aa, synthetic construct
LNSSM

SEQ ID NO: 1083 - protein, 5 aa, synthetic construct
LNSSM

SEQ ID NO: 1084 - protein, 5 aa, synthetic construct
LNSSM

SEQ ID NO: 1085 - protein, 5 aa, synthetic construct
LNSSM

SEQ ID NO: 1086 - protein, 5 aa, synthetic construct
LNSSM

SEQ ID NO: 1087 - protein, 5 aa, synthetic construct
LNSSM

SEQ ID NO: 1088 - protein, 5 aa, synthetic construct
LNSSM

SEQ ID NO: 1089 - protein, 5 aa, synthetic construct
LNSSS

SEQ ID NO: 1090 - protein, 5 aa, synthetic construct
LNSSS

SEQ ID NO: 1091 - protein, 5 aa, synthetic construct
LNSSS

SEQ ID NO: 1092 - protein, 5 aa, synthetic construct
LNSSS

SEQ ID NO: 1093 - protein, 5 aa, synthetic construct
LNSSS

SEQ ID NO: 1094 - protein, 5 aa, synthetic construct
LNSSS

SEQ ID NO: 1095 - protein, 5 aa, synthetic construct
LNSST

SEQ ID NO: 1096 - protein, 5 aa, synthetic construct
LNSST

SEQ ID NO: 1097 - protein, 5 aa, synthetic construct
LNSST

SEQ ID NO: 1098 - protein, 5 aa, synthetic construct
LNSST

SEQ ID NO: 1099 - protein, 5 aa, synthetic construct
LNSST

SEQ ID NO: 1100 - protein, 5 aa, synthetic construct
LNSST

SEQ ID NO: 1101 - protein, 5 aa, synthetic construct
LNSST

SEQ ID NO: 1102 - protein, 5 aa, synthetic construct
LNSSV

SEQ ID NO: 1103 - protein, 5 aa, synthetic construct
LNSSV

SEQ ID NO: 1104 - protein, 5 aa, synthetic construct
LNSSV

SEQ ID NO: 1105 - protein, 5 aa, synthetic construct
LNSSV

SEQ ID NO: 1106 - protein, 5 aa, synthetic construct
LNSSV

SEQ ID NO: 1107 - protein, 5 aa, synthetic construct
LNSSV

SEQ ID NO: 1108 - protein, 5 aa, synthetic construct
LNSSV

SEQ ID NO: 1109 - protein, 5 aa, synthetic construct
LNSSV

SEQ ID NO: 1110 - protein, 5 aa, synthetic construct
LNTSA

SEQ ID NO: 1111 - protein, 5 aa, synthetic construct
LNTSA

SEQ ID NO: 1112 - protein, 5 aa, synthetic construct
LNTSA

SEQ ID NO: 1113 - protein, 5 aa, synthetic construct
LNTSA

SEQ ID NO: 1114 - protein, 5 aa, synthetic construct
LNTSA

SEQ ID NO: 1115 - protein, 5 aa, synthetic construct
LNTSA

SEQ ID NO: 1116 - protein, 5 aa, synthetic construct
LNTSA

SEQ ID NO: 1117 - protein, 5 aa, synthetic construct
LNTSA

SEQ ID NO: 1118 - protein, 5 aa, synthetic construct
LNTSA

SEQ ID NO: 1119 - protein, 5 aa, synthetic construct
LNTSG

SEQ ID NO: 1120 - protein, 5 aa, synthetic construct
LNTSG

SEQ ID NO: 1121 - protein, 5 aa, synthetic construct
LNTSG

SEQ ID NO: 1122 - protein, 5 aa, synthetic construct
LNTSG

SEQ ID NO: 1123 - protein, 5 aa, synthetic construct
LNTSG

SEQ ID NO: 1124 - protein, 5 aa, synthetic construct
LNTSG

SEQ ID NO: 1125 - protein, 5 aa, synthetic construct
LNTSG

SEQ ID NO: 1126 - protein, 5 aa, synthetic construct
LNTSG

SEQ ID NO: 1127 - protein, 5 aa, synthetic construct
LNTSG

SEQ ID NO: 1128 - protein, 5 aa, synthetic construct
LNTSM

SEQ ID NO: 1129 - protein, 5 aa, synthetic construct
LNTSM

SEQ ID NO: 1130 - protein, 5 aa, synthetic construct
LNTSM

SEQ ID NO: 1131 - protein, 5 aa, synthetic construct
LNTSM

SEQ ID NO: 1132 - protein, 5 aa, synthetic construct
LNTSM

SEQ ID NO: 1133 - protein, 5 aa, synthetic construct
LNTSM

SEQ ID NO: 1134 - protein, 5 aa, synthetic construct
LNTSM

SEQ ID NO: 1135 - protein, 5 aa, synthetic construct
LNTSM

SEQ ID NO: 1136 - protein, 5 aa, synthetic construct
LNTSS

SEQ ID NO: 1137 - protein, 5 aa, synthetic construct
LNTSS

SEQ ID NO: 1138 - protein, 5 aa, synthetic construct
LNTSS

SEQ ID NO: 1139 - protein, 5 aa, synthetic construct
LNTSS

SEQ ID NO: 1140 - protein, 5 aa, synthetic construct
LNTSS

SEQ ID NO: 1141 - protein, 5 aa, synthetic construct
LNTST

SEQ ID NO: 1142 - protein, 5 aa, synthetic construct
LNTST

SEQ ID NO: 1143 - protein, 5 aa, synthetic construct
LNTST

SEQ ID NO: 1144 - protein, 5 aa, synthetic construct
LNTST

SEQ ID NO: 1145 - protein, 5 aa, synthetic construct
LNTST

SEQ ID NO: 1146 - protein, 5 aa, synthetic construct
LNTST

SEQ ID NO: 1147 - protein, 5 aa, synthetic construct
LNTST

SEQ ID NO: 1148 - protein, 5 aa, synthetic construct
LNTSV

SEQ ID NO: 1149 - protein, 5 aa, synthetic construct
LNTSV

SEQ ID NO: 1150 - protein, 5 aa, synthetic construct
LNTSV

SEQ ID NO: 1151 - protein, 5 aa, synthetic construct
LNTSV

SEQ ID NO: 1152 - protein, 5 aa, synthetic construct
LNTSV

SEQ ID NO: 1153 - protein, 5 aa, synthetic construct
LNTSV

SEQ ID NO: 1154 - protein, 5 aa, synthetic construct
LNTSV

SEQ ID NO: 1155 - protein, 5 aa, synthetic construct
LNYPH

SEQ ID NO: 1156 - protein, 5 aa, synthetic construct
LNYSA

SEQ ID NO: 1157 - protein, 5 aa, synthetic construct
LNYSA

SEQ ID NO: 1158 - protein, 5 aa, synthetic construct
LNYSA

SEQ ID NO: 1159 - protein, 5 aa, synthetic construct
LNYSA

SEQ ID NO: 1160 - protein, 5 aa, synthetic construct
LNYSA

SEQ ID NO: 1161 - protein, 5 aa, synthetic construct
LNYSG

SEQ ID NO: 1162 - protein, 5 aa, synthetic construct
LNYSG

SEQ ID NO: 1163 - protein, 5 aa, synthetic construct
LNYSG

SEQ ID NO: 1164 - protein, 5 aa, synthetic construct
LNYSG

SEQ ID NO: 1165 - protein, 5 aa, synthetic construct
LNYSG

SEQ ID NO: 1166 - protein, 5 aa, synthetic construct
LNYSG

SEQ ID NO: 1167 - protein, 5 aa, synthetic construct
LNYSG

SEQ ID NO: 1168 - protein, 5 aa, synthetic construct
LNYSM

SEQ ID NO: 1169 - protein, 5 aa, synthetic construct
LNYSM

SEQ ID NO: 1170 - protein, 5 aa, synthetic construct
LNYSS

SEQ ID NO: 1171 - protein, 5 aa, synthetic construct
LNYSS

SEQ ID NO: 1172 - protein, 5 aa, synthetic construct
LNYSS

SEQ ID NO: 1173 - protein, 5 aa, synthetic construct
LNYSS

SEQ ID NO: 1174 - protein, 5 aa, synthetic construct
LNYSS

SEQ ID NO: 1175 - protein, 5 aa, synthetic construct
LNYST

SEQ ID NO: 1176 - protein, 5 aa, synthetic construct
LNYST

SEQ ID NO: 1177 - protein, 5 aa, synthetic construct
LNYST

SEQ ID NO: 1178 - protein, 5 aa, synthetic construct
LNYST

SEQ ID NO: 1179 - protein, 5 aa, synthetic construct
LNYST

SEQ ID NO: 1180 - protein, 5 aa, synthetic construct
LNYST

SEQ ID NO: 1181 - protein, 5 aa, synthetic construct
LNYSV

SEQ ID NO: 1182 - protein, 5 aa, synthetic construct
LNYSV

SEQ ID NO: 1183 - protein, 5 aa, synthetic construct
MNASA

SEQ ID NO: 1184 - protein, 5 aa, synthetic construct
MNASA

SEQ ID NO: 1185 - protein, 5 aa, synthetic construct
MNASA

SEQ ID NO: 1186 - protein, 5 aa, synthetic construct
MNASA

SEQ ID NO: 1187 - protein, 5 aa, synthetic construct
MNASA

SEQ ID NO: 1188 - protein, 5 aa, synthetic construct
MNASA

SEQ ID NO: 1189 - protein, 5 aa, synthetic construct
MNASA

SEQ ID NO: 1190 - protein, 5 aa, synthetic construct
MNASG

SEQ ID NO: 1191 - protein, 5 aa, synthetic construct
MNASG

SEQ ID NO: 1192 - protein, 5 aa, synthetic construct
MNASG

SEQ ID NO: 1193 - protein, 5 aa, synthetic construct
MNASG

SEQ ID NO: 1194 - protein, 5 aa, synthetic construct
MNASG

SEQ ID NO: 1195 - protein, 5 aa, synthetic construct
MNASG

SEQ ID NO: 1196 - protein, 5 aa, synthetic construct
MNASG

SEQ ID NO: 1197 - protein, 5 aa, synthetic construct
MNASI

SEQ ID NO: 1198 - protein, 5 aa, synthetic construct
MNASM

SEQ ID NO: 1199 - protein, 5 aa, synthetic construct
MNASM

SEQ ID NO: 1200 - protein, 5 aa, synthetic construct
MNASM

SEQ ID NO: 1201 - protein, 5 aa, synthetic construct
MNASM

SEQ ID NO: 1202 - protein, 5 aa, synthetic construct
MNASM

SEQ ID NO: 1203 - protein, 5 aa, synthetic construct
MNASS

SEQ ID NO: 1204 - protein, 5 aa, synthetic construct
MNAST

SEQ ID NO: 1205 - protein, 5 aa, synthetic construct
MNAST

SEQ ID NO: 1206 - protein, 5 aa, synthetic construct
MNAST

SEQ ID NO: 1207 - protein, 5 aa, synthetic construct
MNAST

SEQ ID NO: 1208 - protein, 5 aa, synthetic construct
MNAST

SEQ ID NO: 1209 - protein, 5 aa, synthetic construct
MNAST

SEQ ID NO: 1210 - protein, 5 aa, synthetic construct
MNAST

SEQ ID NO: 1211 - protein, 5 aa, synthetic construct
MNAST

SEQ ID NO: 1212 - protein, 5 aa, synthetic construct
MNASV

SEQ ID NO: 1213 - protein, 5 aa, synthetic construct
MNASV

SEQ ID NO: 1214 - protein, 5 aa, synthetic construct
MNASV

SEQ ID NO: 1215 - protein, 5 aa, synthetic construct
MNASV

SEQ ID NO: 1216 - protein, 5 aa, synthetic construct
MNASV

SEQ ID NO: 1217 - protein, 5 aa, synthetic construct
MNASV

SEQ ID NO: 1218 - protein, 5 aa, synthetic construct
MNGNF

SEQ ID NO: 1219 - protein, 5 aa, synthetic construct
MNGSA

SEQ ID NO: 1220 - protein, 5 aa, synthetic construct
MNGSA

SEQ ID NO: 1221 - protein, 5 aa, synthetic construct
MNGSA

SEQ ID NO: 1222 - protein, 5 aa, synthetic construct
MNGSA

SEQ ID NO: 1223 - protein, 5 aa, synthetic construct
MNGSA

SEQ ID NO: 1224 - protein, 5 aa, synthetic construct
MNGSG

SEQ ID NO: 1225 - protein, 5 aa, synthetic construct
MNGSG

SEQ ID NO: 1226 - protein, 5 aa, synthetic construct
MNGSG

SEQ ID NO: 1227 - protein, 5 aa, synthetic construct
MNGSG

SEQ ID NO: 1228 - protein, 5 aa, synthetic construct
MNGSG

SEQ ID NO: 1229 - protein, 5 aa, synthetic construct
MNGSG

SEQ ID NO: 1230 - protein, 5 aa, synthetic construct
MNGSG

SEQ ID NO: 1231 - protein, 5 aa, synthetic construct
MNGSG

SEQ ID NO: 1232 - protein, 5 aa, synthetic construct
MNGSM

SEQ ID NO: 1233 - protein, 5 aa, synthetic construct
MNGSM

SEQ ID NO: 1234 - protein, 5 aa, synthetic construct
MNGSM

SEQ ID NO: 1235 - protein, 5 aa, synthetic construct
MNGSS

SEQ ID NO: 1236 - protein, 5 aa, synthetic construct
MNGST

SEQ ID NO: 1237 - protein, 5 aa, synthetic construct
MNGST

SEQ ID NO: 1238 - protein, 5 aa, synthetic construct
MNGST

SEQ ID NO: 1239 - protein, 5 aa, synthetic construct
MNGST

SEQ ID NO: 1240 - protein, 5 aa, synthetic construct
MNGST

SEQ ID NO: 1241 - protein, 5 aa, synthetic construct
MNGST

SEQ ID NO: 1242 - protein, 5 aa, synthetic construct
MNGSV

SEQ ID NO: 1243 - protein, 5 aa, synthetic construct
MNGSV

SEQ ID NO: 1244 - protein, 5 aa, synthetic construct
MNGSV

SEQ ID NO: 1245 - protein, 5 aa, synthetic construct
MNSGM

SEQ ID NO: 1246 - protein, 5 aa, synthetic construct
MNSSA

SEQ ID NO: 1247 - protein, 5 aa, synthetic construct
MNSSA

SEQ ID NO: 1248 - protein, 5 aa, synthetic construct
MNSSA

SEQ ID NO: 1249 - protein, 5 aa, synthetic construct
MNSSA

SEQ ID NO: 1250 - protein, 5 aa, synthetic construct
MNSSA

SEQ ID NO: 1251 - protein, 5 aa, synthetic construct
MNSSA

SEQ ID NO: 1252 - protein, 5 aa, synthetic construct
MNSSA

SEQ ID NO: 1253 - protein, 5 aa, synthetic construct
MNSSG

SEQ ID NO: 1254 - protein, 5 aa, synthetic construct
MNSSG

SEQ ID NO: 1255 - protein, 5 aa, synthetic construct
MNSSG

SEQ ID NO: 1256 - protein, 5 aa, synthetic construct
MNSSG

SEQ ID NO: 1257 - protein, 5 aa, synthetic construct
MNSSG

SEQ ID NO: 1258 - protein, 5 aa, synthetic construct
MNSSG

SEQ ID NO: 1259 - protein, 5 aa, synthetic construct
MNSSG

SEQ ID NO: 1260 - protein, 5 aa, synthetic construct
MNSSG

SEQ ID NO: 1261 - protein, 5 aa, synthetic construct
MNSSM

SEQ ID NO: 1262 - protein, 5 aa, synthetic construct
MNSSM

SEQ ID NO: 1263 - protein, 5 aa, synthetic construct
MNSSM

SEQ ID NO: 1264 - protein, 5 aa, synthetic construct
MNSSM

SEQ ID NO: 1265 - protein, 5 aa, synthetic construct
MNSSM

SEQ ID NO: 1266 - protein, 5 aa, synthetic construct
MNSSM

SEQ ID NO: 1267 - protein, 5 aa, synthetic construct
MNSSM

SEQ ID NO: 1268 - protein, 5 aa, synthetic construct
MNSSS

SEQ ID NO: 1269 - protein, 5 aa, synthetic construct
MNSST

SEQ ID NO: 1270 - protein, 5 aa, synthetic construct
MNSST

SEQ ID NO: 1271 - protein, 5 aa, synthetic construct
MNSST

SEQ ID NO: 1272 - protein, 5 aa, synthetic construct
MNSST

SEQ ID NO: 1273 - protein, 5 aa, synthetic construct
MNSST

SEQ ID NO: 1274 - protein, 5 aa, synthetic construct
MNSSV

SEQ ID NO: 1275 - protein, 5 aa, synthetic construct
MNSSV

SEQ ID NO: 1276 - protein, 5 aa, synthetic construct
MNSSV

SEQ ID NO: 1277 - protein, 5 aa, synthetic construct
MNSSV

SEQ ID NO: 1278 - protein, 5 aa, synthetic construct
MNSSV

SEQ ID NO: 1279 - protein, 5 aa, synthetic construct
MNTSA

SEQ ID NO: 1280 - protein, 5 aa, synthetic construct
MNTSG

SEQ ID NO: 1281 - protein, 5 aa, synthetic construct
MNTSG

SEQ ID NO: 1282 - protein, 5 aa, synthetic construct
MNTSG

SEQ ID NO: 1283 - protein, 5 aa, synthetic construct
MNTSM

SEQ ID NO: 1284 - protein, 5 aa, synthetic construct
MNTST

SEQ ID NO: 1285 - protein, 5 aa, synthetic construct
MNYPH

SEQ ID NO: 1286 - protein, 5 aa, synthetic construct
MNYSA

SEQ ID NO: 1287 - protein, 5 aa, synthetic construct
MNYSA

SEQ ID NO: 1288 - protein, 5 aa, synthetic construct
MNYSA

SEQ ID NO: 1289 - protein, 5 aa, synthetic construct
MNYSA

SEQ ID NO: 1290 - protein, 5 aa, synthetic construct
MNYSG

SEQ ID NO: 1291 - protein, 5 aa, synthetic construct
MNYSG

SEQ ID NO: 1292 - protein, 5 aa, synthetic construct
MNYSG

SEQ ID NO: 1293 - protein, 5 aa, synthetic construct
MNYSG

SEQ ID NO: 1294 - protein, 5 aa, synthetic construct
MNYSG

SEQ ID NO: 1295 - protein, 5 aa, synthetic construct
MNYSS

SEQ ID NO: 1296 - protein, 5 aa, synthetic construct
MNYST

SEQ ID NO: 1297 - protein, 5 aa, synthetic construct
MNYST

SEQ ID NO: 1298 - protein, 5 aa, synthetic construct
MNYST

SEQ ID NO: 1299 - protein, 5 aa, synthetic construct
MNYST

SEQ ID NO: 1300 - protein, 5 aa, synthetic construct
NNSGM

SEQ ID NO: 1301 - protein, 5 aa, synthetic construct
QNSGM

SEQ ID NO: 1302 - protein, 5 aa, synthetic construct
SNASA

SEQ ID NO: 1303 - protein, 5 aa, synthetic construct
SNASA

SEQ ID NO: 1304 - protein, 5 aa, synthetic construct
SNASA

SEQ ID NO: 1305 - protein, 5 aa, synthetic construct
SNASA

SEQ ID NO: 1306 - protein, 5 aa, synthetic construct
SNASA

SEQ ID NO: 1307 - protein, 5 aa, synthetic construct
SNASA

SEQ ID NO: 1308 - protein, 5 aa, synthetic construct
SNASA

SEQ ID NO: 1309 - protein, 5 aa, synthetic construct
SNASA

SEQ ID NO: 1310 - protein, 5 aa, synthetic construct
SNASA

SEQ ID NO: 1311 - protein, 5 aa, synthetic construct
SNASG

SEQ ID NO: 1312 - protein, 5 aa, synthetic construct
SNASG

SEQ ID NO: 1313 - protein, 5 aa, synthetic construct
SNASG

SEQ ID NO: 1314 - protein, 5 aa, synthetic construct
SNASG

SEQ ID NO: 1315 - protein, 5 aa, synthetic construct
SNASG

SEQ ID NO: 1316 - protein, 5 aa, synthetic construct
SNASG

SEQ ID NO: 1317 - protein, 5 aa, synthetic construct
SNASG

SEQ ID NO: 1318 - protein, 5 aa, synthetic construct
SNASG

SEQ ID NO: 1319 - protein, 5 aa, synthetic construct
SNASG

SEQ ID NO: 1320 - protein, 5 aa, synthetic construct
SNASI

SEQ ID NO: 1321 - protein, 5 aa, synthetic construct
SNASM

SEQ ID NO: 1322 - protein, 5 aa, synthetic construct
SNASM

SEQ ID NO: 1323 - protein, 5 aa, synthetic construct
SNASM

SEQ ID NO: 1324 - protein, 5 aa, synthetic construct
SNASM

SEQ ID NO: 1325 - protein, 5 aa, synthetic construct
SNASM

SEQ ID NO: 1326 - protein, 5 aa, synthetic construct
SNASM

SEQ ID NO: 1327 - protein, 5 aa, synthetic construct
SNASS

SEQ ID NO: 1328 - protein, 5 aa, synthetic construct
SNASS

SEQ ID NO: 1329 - protein, 5 aa, synthetic construct
SNASS

SEQ ID NO: 1330 - protein, 5 aa, synthetic construct
SNASS

SEQ ID NO: 1331 - protein, 5 aa, synthetic construct
SNASS

SEQ ID NO: 1332 - protein, 5 aa, synthetic construct
SNASS

SEQ ID NO: 1333 - protein, 5 aa, synthetic construct
SNASS

SEQ ID NO: 1334 - protein, 5 aa, synthetic construct
SNASS

SEQ ID NO: 1335 - protein, 5 aa, synthetic construct
SNAST

SEQ ID NO: 1336 - protein, 5 aa, synthetic construct
SNAST

SEQ ID NO: 1337 - protein, 5 aa, synthetic construct
SNAST

SEQ ID NO: 1338 - protein, 5 aa, synthetic construct
SNAST

SEQ ID NO: 1339 - protein, 5 aa, synthetic construct
SNAST

SEQ ID NO: 1340 - protein, 5 aa, synthetic construct
SNAST

SEQ ID NO: 1341 - protein, 5 aa, synthetic construct
SNAST

SEQ ID NO: 1342 - protein, 5 aa, synthetic construct
SNAST

SEQ ID NO: 1343 - protein, 5 aa, synthetic construct
SNAST

SEQ ID NO: 1344 - protein, 5 aa, synthetic construct
SNASV

SEQ ID NO: 1345 - protein, 5 aa, synthetic construct
SNASV

SEQ ID NO: 1346 - protein, 5 aa, synthetic construct
SNASV

SEQ ID NO: 1347 - protein, 5 aa, synthetic construct
SNASV

SEQ ID NO: 1348 - protein, 5 aa, synthetic construct
SNASV

SEQ ID NO: 1349 - protein, 5 aa, synthetic construct
SNASV

SEQ ID NO: 1350 - protein, 5 aa, synthetic construct
SNASV

SEQ ID NO: 1351 - protein, 5 aa, synthetic construct
SNASV

SEQ ID NO: 1352 - protein, 5 aa, synthetic construct
SNGNF

SEQ ID NO: 1353 - protein, 5 aa, synthetic construct
SNGNV

SEQ ID NO: 1354 - protein, 5 aa, synthetic construct
SNGSA

SEQ ID NO: 1355 - protein, 5 aa, synthetic construct
SNGSA

SEQ ID NO: 1356 - protein, 5 aa, synthetic construct
SNGSA

SEQ ID NO: 1357 - protein, 5 aa, synthetic construct
SNGSA

SEQ ID NO: 1358 - protein, 5 aa, synthetic construct
SNGSG

SEQ ID NO: 1359 - protein, 5 aa, synthetic construct
SNGSG

SEQ ID NO: 1360 - protein, 5 aa, synthetic construct
SNGSG

SEQ ID NO: 1361 - protein, 5 aa, synthetic construct
SNGSG

SEQ ID NO: 1362 - protein, 5 aa, synthetic construct
SNGSG

SEQ ID NO: 1363 - protein, 5 aa, synthetic construct
SNGSG

SEQ ID NO: 1364 - protein, 5 aa, synthetic construct
SNGSG

SEQ ID NO: 1365 - protein, 5 aa, synthetic construct
SNGSG

SEQ ID NO: 1366 - protein, 5 aa, synthetic construct
SNGSM

SEQ ID NO: 1367 - protein, 5 aa, synthetic construct
SNGSM

SEQ ID NO: 1368 - protein, 5 aa, synthetic construct
SNGSM

SEQ ID NO: 1369 - protein, 5 aa, synthetic construct
SNGSM

SEQ ID NO: 1370 - protein, 5 aa, synthetic construct
SNGSM

SEQ ID NO: 1371 - protein, 5 aa, synthetic construct
SNGSS

SEQ ID NO: 1372 - protein, 5 aa, synthetic construct
SNGSS

SEQ ID NO: 1373 - protein, 5 aa, synthetic construct
SNGST

SEQ ID NO: 1374 - protein, 5 aa, synthetic construct
SNGST

SEQ ID NO: 1375 - protein, 5 aa, synthetic construct
SNGST

SEQ ID NO: 1376 - protein, 5 aa, synthetic construct
SNGST

SEQ ID NO: 1377 - protein, 5 aa, synthetic construct
SNGST

SEQ ID NO: 1378 - protein, 5 aa, synthetic construct
SNGST

SEQ ID NO: 1379 - protein, 5 aa, synthetic construct
SNGST

SEQ ID NO: 1380 - protein, 5 aa, synthetic construct
SNGSV

SEQ ID NO: 1381 - protein, 5 aa, synthetic construct
SNGSV

SEQ ID NO: 1382 - protein, 5 aa, synthetic construct
SNGSV

SEQ ID NO: 1383 - protein, 5 aa, synthetic construct
SNGSV

SEQ ID NO: 1384 - protein, 5 aa, synthetic construct
SNSGM

SEQ ID NO: 1385 - protein, 5 aa, synthetic construct
SNSSA

SEQ ID NO: 1386 - protein, 5 aa, synthetic construct
SNSSA

SEQ ID NO: 1387 - protein, 5 aa, synthetic construct
SNSSA

SEQ ID NO: 1388 - protein, 5 aa, synthetic construct
SNSSA

SEQ ID NO: 1389 - protein, 5 aa, synthetic construct
SNSSA

SEQ ID NO: 1390 - protein, 5 aa, synthetic construct
SNSSA

SEQ ID NO: 1391 - protein, 5 aa, synthetic construct
SNSSA

SEQ ID NO: 1392 - protein, 5 aa, synthetic construct
SNSSA

SEQ ID NO: 1393 - protein, 5 aa, synthetic construct
SNSSG

SEQ ID NO: 1394 - protein, 5 aa, synthetic construct
SNSSG

SEQ ID NO: 1395 - protein, 5 aa, synthetic construct
SNSSG

SEQ ID NO: 1396 - protein, 5 aa, synthetic construct
SNSSG

SEQ ID NO: 1397 - protein, 5 aa, synthetic construct
SNSSG

SEQ ID NO: 1398 - protein, 5 aa, synthetic construct
SNSSG

SEQ ID NO: 1399 - protein, 5 aa, synthetic construct
SNSSG

SEQ ID NO: 1400 - protein, 5 aa, synthetic construct
SNSSG

SEQ ID NO: 1401 - protein, 5 aa, synthetic construct
SNSSM

SEQ ID NO: 1402 - protein, 5 aa, synthetic construct
SNSSM

SEQ ID NO: 1403 - protein, 5 aa, synthetic construct
SNSSM

SEQ ID NO: 1404 - protein, 5 aa, synthetic construct
SNSSM

SEQ ID NO: 1405 - protein, 5 aa, synthetic construct
SNSSM

SEQ ID NO: 1406 - protein, 5 aa, synthetic construct
SNSSM

SEQ ID NO: 1407 - protein, 5 aa, synthetic construct
SNSSM

SEQ ID NO: 1408 - protein, 5 aa, synthetic construct
SNSSS

SEQ ID NO: 1409 - protein, 5 aa, synthetic construct
SNSSS

SEQ ID NO: 1410 - protein, 5 aa, synthetic construct
SNSSS

SEQ ID NO: 1411 - protein, 5 aa, synthetic construct
SNSSS

SEQ ID NO: 1412 - protein, 5 aa, synthetic construct
SNSSS

SEQ ID NO: 1413 - protein, 5 aa, synthetic construct
SNSST

SEQ ID NO: 1414 - protein, 5 aa, synthetic construct
SNSST

SEQ ID NO: 1415 - protein, 5 aa, synthetic construct
SNSST

SEQ ID NO: 1416 - protein, 5 aa, synthetic construct
SNSST

SEQ ID NO: 1417 - protein, 5 aa, synthetic construct
SNSST

SEQ ID NO: 1418 - protein, 5 aa, synthetic construct
SNSST

SEQ ID NO: 1419 - protein, 5 aa, synthetic construct
SNSST

SEQ ID NO: 1420 - protein, 5 aa, synthetic construct
SNSSV

SEQ ID NO: 1421 - protein, 5 aa, synthetic construct
SNSSV

SEQ ID NO: 1422 - protein, 5 aa, synthetic construct
SNSSV

SEQ ID NO: 1423 - protein, 5 aa, synthetic construct
SNTSA

SEQ ID NO: 1424 - protein, 5 aa, synthetic construct
SNTSA

SEQ ID NO: 1425 - protein, 5 aa, synthetic construct
SNTSA

SEQ ID NO: 1426 - protein, 5 aa, synthetic construct
SNTSA

SEQ ID NO: 1427 - protein, 5 aa, synthetic construct
SNTSA

SEQ ID NO: 1428 - protein, 5 aa, synthetic construct
SNTSA

SEQ ID NO: 1429 - protein, 5 aa, synthetic construct
SNTSA

SEQ ID NO: 1430 - protein, 5 aa, synthetic construct
SNTSG

SEQ ID NO: 1431 - protein, 5 aa, synthetic construct
SNTSG

SEQ ID NO: 1432 - protein, 5 aa, synthetic construct
SNTSG

SEQ ID NO: 1433 - protein, 5 aa, synthetic construct
SNTSG

SEQ ID NO: 1434 - protein, 5 aa, synthetic construct
SNTSG

SEQ ID NO: 1435 - protein, 5 aa, synthetic construct
SNTSG

SEQ ID NO: 1436 - protein, 5 aa, synthetic construct
SNTSG

SEQ ID NO: 1437 - protein, 5 aa, synthetic construct
SNTSG

SEQ ID NO: 1438 - protein, 5 aa, synthetic construct
SNTSM

SEQ ID NO: 1439 - protein, 5 aa, synthetic construct
SNTSM

SEQ ID NO: 1440 - protein, 5 aa, synthetic construct
SNTSM

SEQ ID NO: 1441 - protein, 5 aa, synthetic construct
SNTSM

SEQ ID NO: 1442 - protein, 5 aa, synthetic construct
SNTSS

SEQ ID NO: 1443 - protein, 5 aa, synthetic construct
SNTST

SEQ ID NO: 1444 - protein, 5 aa, synthetic construct
SNTST

SEQ ID NO: 1445 - protein, 5 aa, synthetic construct
SNTST

SEQ ID NO: 1446 - protein, 5 aa, synthetic construct
SNTSV

SEQ ID NO: 1447 - protein, 5 aa, synthetic construct
SNTSV

SEQ ID NO: 1448 - protein, 5 aa, synthetic construct
SNTSV

SEQ ID NO: 1449 - protein, 5 aa, synthetic construct
SNTSV

SEQ ID NO: 1450 - protein, 5 aa, synthetic construct
SNYPH

SEQ ID NO: 1451 - protein, 5 aa, synthetic construct
SNYSA

SEQ ID NO: 1452 - protein, 5 aa, synthetic construct
SNYSA

SEQ ID NO: 1453 - protein, 5 aa, synthetic construct
SNYSA

SEQ ID NO: 1454 - protein, 5 aa, synthetic construct
SNYSA

SEQ ID NO: 1455 - protein, 5 aa, synthetic construct
SNYSA

SEQ ID NO: 1456 - protein, 5 aa, synthetic construct
SNYSA

SEQ ID NO: 1457 - protein, 5 aa, synthetic construct
SNYSA

SEQ ID NO: 1458 - protein, 5 aa, synthetic construct
SNYSG

SEQ ID NO: 1459 - protein, 5 aa, synthetic construct
SNYSG

SEQ ID NO: 1460 - protein, 5 aa, synthetic construct
SNYSG

SEQ ID NO: 1461 - protein, 5 aa, synthetic construct
SNYSG

SEQ ID NO: 1462 - protein, 5 aa, synthetic construct
SNYSG

SEQ ID NO: 1463 - protein, 5 aa, synthetic construct
SNYSM

SEQ ID NO: 1464 - protein, 5 aa, synthetic construct
SNYSM

SEQ ID NO: 1465 - protein, 5 aa, synthetic construct
SNYSM

SEQ ID NO: 1466 - protein, 5 aa, synthetic construct
SNYSM

SEQ ID NO: 1467 - protein, 5 aa, synthetic construct
SNYSM

SEQ ID NO: 1468 - protein, 5 aa, synthetic construct
SNYSS

SEQ ID NO: 1469 - protein, 5 aa, synthetic construct
SNYSS

SEQ ID NO: 1470 - protein, 5 aa, synthetic construct
SNYSS

SEQ ID NO: 1471 - protein, 5 aa, synthetic construct
SNYSS

SEQ ID NO: 1472 - protein, 5 aa, synthetic construct
SNYST

SEQ ID NO: 1473 - protein, 5 aa, synthetic construct
SNYST

SEQ ID NO: 1474 - protein, 5 aa, synthetic construct
SNYST

SEQ ID NO: 1475 - protein, 5 aa, synthetic construct
SNYST

SEQ ID NO: 1476 - protein, 5 aa, synthetic construct
SNYST

SEQ ID NO: 1477 - protein, 5 aa, synthetic construct
SNYST

SEQ ID NO: 1478 - protein, 5 aa, synthetic construct
SNYSV

SEQ ID NO: 1479 - protein, 5 aa, synthetic construct
SNYSV

SEQ ID NO: 1480 - protein, 5 aa, synthetic construct
SNYSV

SEQ ID NO: 1481 - protein, 5 aa, synthetic construct
TNSGM

SEQ ID NO: 1482 - protein, 5 aa, synthetic construct
VNASA

SEQ ID NO: 1483 - protein, 5 aa, synthetic construct
VNASA

SEQ ID NO: 1484 - protein, 5 aa, synthetic construct
VNASA

SEQ ID NO: 1485 - protein, 5 aa, synthetic construct
VNASA

SEQ ID NO: 1486 - protein, 5 aa, synthetic construct
VNASA

SEQ ID NO: 1487 - protein, 5 aa, synthetic construct
VNASA

SEQ ID NO: 1488 - protein, 5 aa, synthetic construct
VNASG

SEQ ID NO: 1489 - protein, 5 aa, synthetic construct
VNASG

SEQ ID NO: 1490 - protein, 5 aa, synthetic construct
VNASG

SEQ ID NO: 1491 - protein, 5 aa, synthetic construct
VNASG

SEQ ID NO: 1492 - protein, 5 aa, synthetic construct
VNASG

SEQ ID NO: 1493 - protein, 5 aa, synthetic construct
VNASG

SEQ ID NO: 1494 - protein, 5 aa, synthetic construct
VNASG

SEQ ID NO: 1495 - protein, 5 aa, synthetic construct
VNASM

SEQ ID NO: 1496 - protein, 5 aa, synthetic construct
VNASM

SEQ ID NO: 1497 - protein, 5 aa, synthetic construct
VNASM

SEQ ID NO: 1498 - protein, 5 aa, synthetic construct
VNASS

SEQ ID NO: 1499 - protein, 5 aa, synthetic construct
VNASS

SEQ ID NO: 1500 - protein, 5 aa, synthetic construct
VNASS

SEQ ID NO: 1501 - protein, 5 aa, synthetic construct
VNAST

SEQ ID NO: 1502 - protein, 5 aa, synthetic construct
VNAST

SEQ ID NO: 1503 - protein, 5 aa, synthetic construct
VNAST

SEQ ID NO: 1504 - protein, 5 aa, synthetic construct
VNAST

SEQ ID NO: 1505 - protein, 5 aa, synthetic construct
VNAST

SEQ ID NO: 1506 - protein, 5 aa, synthetic construct
VNAST

SEQ ID NO: 1507 - protein, 5 aa, synthetic construct
VNAST

SEQ ID NO: 1508 - protein, 5 aa, synthetic construct
VNASV

SEQ ID NO: 1509 - protein, 5 aa, synthetic construct
VNASV

SEQ ID NO: 1510 - protein, 5 aa, synthetic construct
VNASV

SEQ ID NO: 1511 - protein, 5 aa, synthetic construct
VNASV

SEQ ID NO: 1512 - protein, 5 aa, synthetic construct
VNASV

SEQ ID NO: 1513 - protein, 5 aa, synthetic construct
VNGNF

SEQ ID NO: 1514 - protein, 5 aa, synthetic construct
VNGNV

SEQ ID NO: 1515 - protein, 5 aa, synthetic construct
VNGSA

SEQ ID NO: 1516 - protein, 5 aa, synthetic construct
VNGSA

SEQ ID NO: 1517 - protein, 5 aa, synthetic construct
VNGSA

SEQ ID NO: 1518 - protein, 5 aa, synthetic construct
VNGSA

SEQ ID NO: 1519 - protein, 5 aa, synthetic construct
VNGSA

SEQ ID NO: 1520 - protein, 5 aa, synthetic construct
VNGSA

SEQ ID NO: 1521 - protein, 5 aa, synthetic construct
VNGSA

SEQ ID NO: 1522 - protein, 5 aa, synthetic construct
VNGSG

SEQ ID NO: 1523 - protein, 5 aa, synthetic construct
VNGSG

SEQ ID NO: 1524 - protein, 5 aa, synthetic construct
VNGSG

SEQ ID NO: 1525 - protein, 5 aa, synthetic construct
VNGSG

SEQ ID NO: 1526 - protein, 5 aa, synthetic construct
VNGSG

SEQ ID NO: 1527 - protein, 5 aa, synthetic construct
VNGSG

SEQ ID NO: 1528 - protein, 5 aa, synthetic construct
VNGSG

SEQ ID NO: 1529 - protein, 5 aa, synthetic construct
VNGSG

SEQ ID NO: 1530 - protein, 5 aa, synthetic construct
VNGSG

SEQ ID NO: 1531 - protein, 5 aa, synthetic construct
VNGSM

SEQ ID NO: 1532 - protein, 5 aa, synthetic construct
VNGSM

SEQ ID NO: 1533 - protein, 5 aa, synthetic construct
VNGSM

SEQ ID NO: 1534 - protein, 5 aa, synthetic construct
VNGSM

SEQ ID NO: 1535 - protein, 5 aa, synthetic construct
VNGSS

SEQ ID NO: 1536 - protein, 5 aa, synthetic construct
VNGSS

SEQ ID NO: 1537 - protein, 5 aa, synthetic construct
VNGSS

SEQ ID NO: 1538 - protein, 5 aa, synthetic construct
VNGSS

SEQ ID NO: 1539 - protein, 5 aa, synthetic construct
VNGSS

SEQ ID NO: 1540 - protein, 5 aa, synthetic construct
VNGSS

SEQ ID NO: 1541 - protein, 5 aa, synthetic construct
VNGST

SEQ ID NO: 1542 - protein, 5 aa, synthetic construct
VNGST

SEQ ID NO: 1543 - protein, 5 aa, synthetic construct
VNGST

SEQ ID NO: 1544 - protein, 5 aa, synthetic construct
VNGST

SEQ ID NO: 1545 - protein, 5 aa, synthetic construct
VNGST

SEQ ID NO: 1546 - protein, 5 aa, synthetic construct
VNGST

SEQ ID NO: 1547 - protein, 5 aa, synthetic construct
VNGST

SEQ ID NO: 1548 - protein, 5 aa, synthetic construct
VNGSV

SEQ ID NO: 1549 - protein, 5 aa, synthetic construct
VNGSV

SEQ ID NO: 1550 - protein, 5 aa, synthetic construct
VNGSV

SEQ ID NO: 1551 - protein, 5 aa, synthetic construct
VNGSV

SEQ ID NO: 1552 - protein, 5 aa, synthetic construct
VNSGM

SEQ ID NO: 1553 - protein, 5 aa, synthetic construct
VNSSA

SEQ ID NO: 1554 - protein, 5 aa, synthetic construct
VNSSA

SEQ ID NO: 1555 - protein, 5 aa, synthetic construct
VNSSA

SEQ ID NO: 1556 - protein, 5 aa, synthetic construct
VNSSA

SEQ ID NO: 1557 - protein, 5 aa, synthetic construct
VNSSA

SEQ ID NO: 1558 - protein, 5 aa, synthetic construct
VNSSA

SEQ ID NO: 1559 - protein, 5 aa, synthetic construct
VNSSG

SEQ ID NO: 1560 - protein, 5 aa, synthetic construct
VNSSG

SEQ ID NO: 1561 - protein, 5 aa, synthetic construct
VNSSG

SEQ ID NO: 1562 - protein, 5 aa, synthetic construct
VNSSG

SEQ ID NO: 1563 - protein, 5 aa, synthetic construct
VNSSG

SEQ ID NO: 1564 - protein, 5 aa, synthetic construct
VNSSG

SEQ ID NO: 1565 - protein, 5 aa, synthetic construct
VNSSM

SEQ ID NO: 1566 - protein, 5 aa, synthetic construct
VNSSM

SEQ ID NO: 1567 - protein, 5 aa, synthetic construct
VNSSM

SEQ ID NO: 1568 - protein, 5 aa, synthetic construct
VNSSM

SEQ ID NO: 1569 - protein, 5 aa, synthetic construct
VNSSS

SEQ ID NO: 1570 - protein, 5 aa, synthetic construct
VNSSS

SEQ ID NO: 1571 - protein, 5 aa, synthetic construct
VNSSS

SEQ ID NO: 1572 - protein, 5 aa, synthetic construct
VNSST

SEQ ID NO: 1573 - protein, 5 aa, synthetic construct
VNSST

SEQ ID NO: 1574 - protein, 5 aa, synthetic construct
VNSST

SEQ ID NO: 1575 - protein, 5 aa, synthetic construct
VNSST

SEQ ID NO: 1576 - protein, 5 aa, synthetic construct
VNSSV

SEQ ID NO: 1577 - protein, 5 aa, synthetic construct
VNSSV

SEQ ID NO: 1578 - protein, 5 aa, synthetic construct
VNSSV

SEQ ID NO: 1579 - protein, 5 aa, synthetic construct
VNTSA

SEQ ID NO: 1580 - protein, 5 aa, synthetic construct
VNTSG

SEQ ID NO: 1581 - protein, 5 aa, synthetic construct
VNTSG

SEQ ID NO: 1582 - protein, 5 aa, synthetic construct
VNTSG

SEQ ID NO: 1583 - protein, 5 aa, synthetic construct
VNTSG

SEQ ID NO: 1584 - protein, 5 aa, synthetic construct
VNTSG

SEQ ID NO: 1585 - protein, 5 aa, synthetic construct
VNTSG

SEQ ID NO: 1586 - protein, 5 aa, synthetic construct
VNTSG

SEQ ID NO: 1587 - protein, 5 aa, synthetic construct
VNTST

SEQ ID NO: 1588 - protein, 5 aa, synthetic construct
VNYPH

SEQ ID NO: 1589 - protein, 5 aa, synthetic construct
VNYSA

SEQ ID NO: 1590 - protein, 5 aa, synthetic construct
VNYSA

SEQ ID NO: 1591 - protein, 5 aa, synthetic construct
VNYSA

SEQ ID NO: 1592 - protein, 5 aa, synthetic construct
VNYSA

SEQ ID NO: 1593 - protein, 5 aa, synthetic construct
VNYSG

SEQ ID NO: 1594 - protein, 5 aa, synthetic construct
VNYSG

SEQ ID NO: 1595 - protein, 5 aa, synthetic construct
VNYSG

SEQ ID NO: 1596 - protein, 5 aa, synthetic construct
VNYSG

SEQ ID NO: 1597 - protein, 5 aa, synthetic construct
VNYSG

SEQ ID NO: 1598 - protein, 5 aa, synthetic construct
VNYSS

SEQ ID NO: 1599 - protein, 5 aa, synthetic construct
VNYSS

SEQ ID NO: 1600 - protein, 7 aa, synthetic construct
RGDRAAL

SEQ ID NO: 1601 - protein, 7 aa, synthetic construct
RGDRGSL

SEQ ID NO: 1602 - protein, 7 aa, synthetic construct
RGDRGYL

SEQ ID NO: 1603 - protein, 7 aa, synthetic construct
RGDRQAL

SEQ ID NO: 1604 - protein, 7 aa, synthetic construct
RGDRQSL

SEQ ID NO: 1605 - protein, 7 aa, synthetic construct
RGDRQYL

SEQ ID NO: 1606 - protein, 7 aa, synthetic construct
RGDRAAL

SEQ ID NO: 1607 - protein, 7 aa, synthetic construct
RGDRASL

SEQ ID NO: 1608 - protein, 7 aa, synthetic construct
RGDRAYL

SEQ ID NO: 1609 - protein, 7 aa, synthetic construct
RGDRGAL

SEQ ID NO: 1610 - protein, 7 aa, synthetic construct
RGDRGSL

SEQ ID NO: 1611 - protein, 7 aa, synthetic construct
RGDRGYL

SEQ ID NO: 1612 - protein, 7 aa, synthetic construct
RGDRQAL

SEQ ID NO: 1613 - protein, 7 aa, synthetic construct
RGDRQSL

SEQ ID NO: 1614 - protein, 7 aa, synthetic construct
RGDRQYL

SEQ ID NO: 1615 - protein, 7 aa, synthetic construct
RGDRAAL

SEQ ID NO: 1616 - protein, 7 aa, synthetic construct
RGDRASL

SEQ ID NO: 1617 - protein, 7 aa, synthetic construct
RGDRAYL

SEQ ID NO: 1618 - protein, 7 aa, synthetic construct
RGDRQAL

SEQ ID NO: 1619 - protein, 7 aa, synthetic construct
RGDRQSL

SEQ ID NO: 1620 - protein, 7 aa, synthetic construct
RGDRGSL

SEQ ID NO: 1621 - protein, 7 aa, synthetic construct
RGDRGYL

SEQ ID NO: 1622 - protein, 7 aa, synthetic construct
RGDRQAL

SEQ ID NO: 1623 - protein, 7 aa, synthetic construct
RGDRQSL

SEQ ID NO: 1624 - protein, 7 aa, synthetic construct
RGDRQYL

SEQ ID NO: 1625 - protein, 7 aa, synthetic construct
RGDRASL

SEQ ID NO: 1626 - protein, 7 aa, synthetic construct
RGDRAYL

SEQ ID NO: 1627 - protein, 7 aa, synthetic construct
RGDRGAL

SEQ ID NO: 1628 - protein, 7 aa, synthetic construct
RGDRGSL

SEQ ID NO: 1629 - protein, 7 aa, synthetic construct
RGDRGYL

SEQ ID NO: 1630 - protein, 7 aa, synthetic construct
RGDRQAL

SEQ ID NO: 1631 - protein, 7 aa, synthetic construct
RGDRQSL

SEQ ID NO: 1632 - protein, 7 aa, synthetic construct
RGDRQYL

SEQ ID NO: 1633 - protein, 7 aa, synthetic construct
RGDRASL

SEQ ID NO: 1634 - protein, 7 aa, synthetic construct
RGDRGYL

SEQ ID NO: 1635 - protein, 7 aa, synthetic construct
RGDRQAL

SEQ ID NO: 1636 - protein, 7 aa, synthetic construct
RGDRQSL

SEQ ID NO: 1637 - protein, 7 aa, synthetic construct
RGDRQYL

SEQ ID NO: 1638 - protein, 7 aa, synthetic construct
RGDRQNL

SEQ ID NO: 1639 - protein, 7 aa, synthetic construct
RGDRGML

SEQ ID NO: 1640 - protein, 7 aa, synthetic construct
RGDRAYL

SEQ ID NO: 1641 - protein, 7 aa, synthetic construct
RGDRGSL

SEQ ID NO: 1642 - protein, 7 aa, synthetic construct
RGDRGYL

SEQ ID NO: 1643 - protein, 7 aa, synthetic construct
RGDRQAL

SEQ ID NO: 1644 - protein, 7 aa, synthetic construct
RGDRQYL

SEQ ID NO: 1645 - protein, 7 aa, synthetic construct
RGDRAAL

SEQ ID NO: 1646 - protein, 7 aa, synthetic construct
RGDRAYL

SEQ ID NO: 1647 - protein, 7 aa, synthetic construct
RGDRGAL

SEQ ID NO: 1648 - protein, 7 aa, synthetic construct
RGDRGSL

SEQ ID NO: 1649 - protein, 7 aa, synthetic construct
RGDRGYL

SEQ ID NO: 1650 - protein, 7 aa, synthetic construct
RGDRQAL

SEQ ID NO: 1651 - protein, 7 aa, synthetic construct
RGDRQSL

SEQ ID NO: 1652 - protein, 7 aa, synthetic construct
RGDRQYL

SEQ ID NO: 1653 - protein, 7 aa, synthetic construct
RGDRGYL

SEQ ID NO: 1654 - protein, 7 aa, synthetic construct
RGDRQAL

SEQ ID NO: 1655 - protein, 7 aa, synthetic construct
RGDRQSL

SEQ ID NO: 1656 - protein, 7 aa, synthetic construct
RGDRQYL

SEQ ID NO: 1657 - protein, 7 aa, synthetic construct
RGDRAYL

SEQ ID NO: 1658 - protein, 7 aa, synthetic construct
RGDRGSL

SEQ ID NO: 1659 - protein, 7 aa, synthetic construct
RGDRGYL

SEQ ID NO: 1660 - protein, 7 aa, synthetic construct
RGDRQAL

SEQ ID NO: 1661 - protein, 7 aa, synthetic construct
RGDRQSL

SEQ ID NO: 1662 - protein, 7 aa, synthetic construct
RGDRQYL

SEQ ID NO: 1663 - protein, 7 aa, synthetic construct
RGDRAAL

SEQ ID NO: 1664 - protein, 7 aa, synthetic construct
RGDRAYL

SEQ ID NO: 1665 - protein, 7 aa, synthetic construct
RGDRGAL

SEQ ID NO: 1666 - protein, 7 aa, synthetic construct
RGDRGYL

SEQ ID NO: 1667 - protein, 7 aa, synthetic construct
RGDRQAL

SEQ ID NO: 1668 - protein, 7 aa, synthetic construct
RGDRQSL

SEQ ID NO: 1669 - protein, 7 aa, synthetic construct
RGDRQYL

SEQ ID NO: 1670 - protein, 7 aa, synthetic construct
RGDRAYL

SEQ ID NO: 1671 - protein, 7 aa, synthetic construct
RGDRGYL

SEQ ID NO: 1672 - protein, 7 aa, synthetic construct
RGDRQAL

SEQ ID NO: 1673 - protein, 7 aa, synthetic construct
RGDRQYL

SEQ ID NO: 1674 - protein, 7 aa, synthetic construct
RGDRGAL

SEQ ID NO: 1675 - protein, 7 aa, synthetic construct
RGDRGAL

SEQ ID NO: 1676 - protein, 7 aa, synthetic construct
RGDRGSL

SEQ ID NO: 1677 - protein, 7 aa, synthetic construct
RGDRGYL

SEQ ID NO: 1678 - protein, 7 aa, synthetic construct
RGDRQAL

SEQ ID NO: 1679 - protein, 7 aa, synthetic construct
RGDRQSL

SEQ ID NO: 1680 - protein, 7 aa, synthetic construct
RGDRQYL

SEQ ID NO: 1681 - protein, 7 aa, synthetic construct
RGDRAAL

SEQ ID NO: 1682 - protein, 7 aa, synthetic construct
RGDRASL

SEQ ID NO: 1683 - protein, 7 aa, synthetic construct
RGDRAYL

SEQ ID NO: 1684 - protein, 7 aa, synthetic construct
RGDRGAL

SEQ ID NO: 1685 - protein, 7 aa, synthetic construct
RGDRGSL

SEQ ID NO: 1686 - protein, 7 aa, synthetic construct
RGDRGYL

SEQ ID NO: 1687 - protein, 7 aa, synthetic construct
RGDRQAL

SEQ ID NO: 1688 - protein, 7 aa, synthetic construct
RGDRQSL

SEQ ID NO: 1689 - protein, 7 aa, synthetic construct
RGDRQYL

SEQ ID NO: 1690 - protein, 7 aa, synthetic construct
RGDRAYL

SEQ ID NO: 1691 - protein, 7 aa, synthetic construct
RGDRQAL

SEQ ID NO: 1692 - protein, 7 aa, synthetic construct
RGDRQSL

SEQ ID NO: 1693 - protein, 7 aa, synthetic construct
RGDRQYL

SEQ ID NO: 1694 - protein, 7 aa, synthetic construct
RGDRGSL

SEQ ID NO: 1695 - protein, 7 aa, synthetic construct
RGDRGYL

SEQ ID NO: 1696 - protein, 7 aa, synthetic construct
RGDRQAL

SEQ ID NO: 1697 - protein, 7 aa, synthetic construct
RGDRQSL

SEQ ID NO: 1698 - protein, 7 aa, synthetic construct
RGDRQYL

SEQ ID NO: 1699 - protein, 7 aa, synthetic construct
RGDRAAL

SEQ ID NO: 1700 - protein, 7 aa, synthetic construct
RGDRGSL

SEQ ID NO: 1701 - protein, 7 aa, synthetic construct
RGDRQAL

SEQ ID NO: 1702 - protein, 7 aa, synthetic construct
RGDRQSL

SEQ ID NO: 1703 - protein, 7 aa, synthetic construct
RGDRQYL

SEQ ID NO: 1704 - protein, 7 aa, synthetic construct
RGDRAYL

SEQ ID NO: 1705 - protein, 7 aa, synthetic construct
RGDRGYL

SEQ ID NO: 1706 - protein, 7 aa, synthetic construct
RGDRQAL

SEQ ID NO: 1707 - protein, 7 aa, synthetic construct
RGDRQSL

SEQ ID NO: 1708 - protein, 7 aa, synthetic construct
RGDRQYL

SEQ ID NO: 1709 - protein, 7 aa, synthetic construct
RGDRAYL

SEQ ID NO: 1710 - protein, 7 aa, synthetic construct
RGDRGAL

SEQ ID NO: 1711 - protein, 7 aa, synthetic construct
RGDRGSL

SEQ ID NO: 1712 - protein, 7 aa, synthetic construct
RGDRGYL

SEQ ID NO: 1713 - protein, 7 aa, synthetic construct
RGDRQAL

SEQ ID NO: 1714 - protein, 7 aa, synthetic construct
RGDRQYL

SEQ ID NO: 1715 - protein, 7 aa, synthetic construct
RGDRASL

SEQ ID NO: 1716 - protein, 7 aa, synthetic construct
RGDRGAL

SEQ ID NO: 1717 - protein, 7 aa, synthetic construct
RGDRGSL

SEQ ID NO: 1718 - protein, 7 aa, synthetic construct
RGDRGYL

SEQ ID NO: 1719 - protein, 7 aa, synthetic construct
RGDRQAL

SEQ ID NO: 1720 - protein, 7 aa, synthetic construct
RGDRQSL

SEQ ID NO: 1721 - protein, 7 aa, synthetic construct
RGDRQYL

SEQ ID NO: 1722 - protein, 7 aa, synthetic construct
RGDRAYL

SEQ ID NO: 1723 - protein, 7 aa, synthetic construct
RGDRQAL

SEQ ID NO: 1724 - protein, 7 aa, synthetic construct
RGDRQSL

SEQ ID NO: 1725 - protein, 7 aa, synthetic construct
RGDRQYL

SEQ ID NO: 1726 - protein, 7 aa, synthetic construct
RGDRGSL

SEQ ID NO: 1727 - protein, 7 aa, synthetic construct
RGDRQAL

SEQ ID NO: 1728 - protein, 7 aa, synthetic construct
RGDRQYL

SEQ ID NO: 1729 - protein, 7 aa, synthetic construct
RGDRAAL

SEQ ID NO: 1730 - protein, 7 aa, synthetic construct
RGDRQAL

SEQ ID NO: 1731 - protein, 7 aa, synthetic construct
RGDRQSL

SEQ ID NO: 1732 - protein, 7 aa, synthetic construct
RGDRQYL

SEQ ID NO: 1733 - protein, 7 aa, synthetic construct
RGDRAYL

SEQ ID NO: 1734 - protein, 7 aa, synthetic construct
RGDRGSL

SEQ ID NO: 1735 - protein, 7 aa, synthetic construct
RGDRQAL

SEQ ID NO: 1736 - protein, 7 aa, synthetic construct
RGDRQSL

SEQ ID NO: 1737 - protein, 7 aa, synthetic construct
RGDRQYL

SEQ ID NO: 1738 - protein, 7 aa, synthetic construct
RGDRGAL

SEQ ID NO: 1739 - protein, 7 aa, synthetic construct
RGDRAAL

SEQ ID NO: 1740 - protein, 7 aa, synthetic construct
RGDRASL

SEQ ID NO: 1741 - protein, 7 aa, synthetic construct
RGDRGAL

SEQ ID NO: 1742 - protein, 7 aa, synthetic construct
RGDRGSL

SEQ ID NO: 1743 - protein, 7 aa, synthetic construct
RGDRQAL

SEQ ID NO: 1744 - protein, 7 aa, synthetic construct
RGDRQSL

SEQ ID NO: 1745 - protein, 7 aa, synthetic construct
RGDRAAL

SEQ ID NO: 1746 - protein, 7 aa, synthetic construct
RGDRASL

SEQ ID NO: 1747 - protein, 7 aa, synthetic construct
RGDRGAL

SEQ ID NO: 1748 - protein, 7 aa, synthetic construct
RGDRGSL

SEQ ID NO: 1749 - protein, 7 aa, synthetic construct
RGDRQAL

SEQ ID NO: 1750 - protein, 7 aa, synthetic construct
RGDRQSL

SEQ ID NO: 1751 - protein, 7 aa, synthetic construct
RGDRQYL

SEQ ID NO: 1752 - protein, 7 aa, synthetic construct
RGDRAAL

SEQ ID NO: 1753 - protein, 7 aa, synthetic construct
RGDRASL

SEQ ID NO: 1754 - protein, 7 aa, synthetic construct
RGDRAYL

SEQ ID NO: 1755 - protein, 7 aa, synthetic construct
RGDRQAL

SEQ ID NO: 1756 - protein, 7 aa, synthetic construct
RGDRQSL

SEQ ID NO: 1757 - protein, 7 aa, synthetic construct
RGDRGAL

SEQ ID NO: 1758 - protein, 7 aa, synthetic construct
RGDRGSL

SEQ ID NO: 1759 - protein, 7 aa, synthetic construct
RGDRQAL

SEQ ID NO: 1760 - protein, 7 aa, synthetic construct
RGDRQSL

SEQ ID NO: 1761 - protein, 7 aa, synthetic construct
RGDRQYL

SEQ ID NO: 1762 - protein, 7 aa, synthetic construct
RGDRQAL

SEQ ID NO: 1763 - protein, 7 aa, synthetic construct
RGDRQSL

SEQ ID NO: 1764 - protein, 7 aa, synthetic construct
RGDRQYL

SEQ ID NO: 1765 - protein, 7 aa, synthetic construct
RGDRQAL

SEQ ID NO: 1766 - protein, 7 aa, synthetic construct
RGDRQSL

SEQ ID NO: 1767 - protein, 7 aa, synthetic construct
RGDRQYL

SEQ ID NO: 1768 - protein, 7 aa, synthetic construct
RGDRGAL

SEQ ID NO: 1769 - protein, 7 aa, synthetic construct
RGDRGAL

SEQ ID NO: 1770 - protein, 7 aa, synthetic construct
RGDRGAL

SEQ ID NO: 1771 - protein, 7 aa, synthetic construct
RGDRAAL

SEQ ID NO: 1772 - protein, 7 aa, synthetic construct
RGDRASL

SEQ ID NO: 1773 - protein, 7 aa, synthetic construct
RGDRAYL

SEQ ID NO: 1774 - protein, 7 aa, synthetic construct
RGDRGAL

SEQ ID NO: 1775 - protein, 7 aa, synthetic construct
RGDRGSL

SEQ ID NO: 1776 - protein, 7 aa, synthetic construct
RGDRGYL

SEQ ID NO: 1777 - protein, 7 aa, synthetic construct
RGDRQAL

SEQ ID NO: 1778 - protein, 7 aa, synthetic construct
RGDRQSL

SEQ ID NO: 1779 - protein, 7 aa, synthetic construct
RGDRQYL

SEQ ID NO: 1780 - protein, 7 aa, synthetic construct
RGDRAAL

SEQ ID NO: 1781 - protein, 7 aa, synthetic construct
RGDRASL

SEQ ID NO: 1782 - protein, 7 aa, synthetic construct
RGDRAYL

SEQ ID NO: 1783 - protein, 7 aa, synthetic construct
RGDRGAL

SEQ ID NO: 1784 - protein, 7 aa, synthetic construct
RGDRGSL

SEQ ID NO: 1785 - protein, 7 aa, synthetic construct
RGDRGYL

SEQ ID NO: 1786 - protein, 7 aa, synthetic construct
RGDRQAL

SEQ ID NO: 1787 - protein, 7 aa, synthetic construct
RGDRQSL

SEQ ID NO: 1788 - protein, 7 aa, synthetic construct
RGDRQYL

SEQ ID NO: 1789 - protein, 7 aa, synthetic construct
RGDRQLL

SEQ ID NO: 1790 - protein, 7 aa, synthetic construct
RGDRAAL

SEQ ID NO: 1791 - protein, 7 aa, synthetic construct
RGDRASL

SEQ ID NO: 1792 - protein, 7 aa, synthetic construct
RGDRAYL

SEQ ID NO: 1793 - protein, 7 aa, synthetic construct
RGDRGAL

SEQ ID NO: 1794 - protein, 7 aa, synthetic construct
RGDRGSL

SEQ ID NO: 1795 - protein, 7 aa, synthetic construct
RGDRGYL

SEQ ID NO: 1796 - protein, 7 aa, synthetic construct
RGDRQAL

SEQ ID NO: 1797 - protein, 7 aa, synthetic construct
RGDRQSL

SEQ ID NO: 1798 - protein, 7 aa, synthetic construct
RGDRQYL

SEQ ID NO: 1799 - protein, 7 aa, synthetic construct
RGDRAAL

SEQ ID NO: 1800 - protein, 7 aa, synthetic construct
RGDRASL

SEQ ID NO: 1801 - protein, 7 aa, synthetic construct
RGDRGAL

SEQ ID NO: 1802 - protein, 7 aa, synthetic construct
RGDRGSL

SEQ ID NO: 1803 - protein, 7 aa, synthetic construct
RGDRQAL

SEQ ID NO: 1804 - protein, 7 aa, synthetic construct
RGDRQSL

SEQ ID NO: 1805 - protein, 7 aa, synthetic construct
RGDRQYL

SEQ ID NO: 1806 - protein, 7 aa, synthetic construct
RGDRAAL

SEQ ID NO: 1807 - protein, 7 aa, synthetic construct
RGDRASL

SEQ ID NO: 1808 - protein, 7 aa, synthetic construct
RGDRGAL

SEQ ID NO: 1809 - protein, 7 aa, synthetic construct
RGDRGSL

SEQ ID NO: 1810 - protein, 7 aa, synthetic construct
RGDRGYL

SEQ ID NO: 1811 - protein, 7 aa, synthetic construct
RGDRQAL

SEQ ID NO: 1812 - protein, 7 aa, synthetic construct
RGDRQSL

SEQ ID NO: 1813 - protein, 7 aa, synthetic construct
RGDRQYL

SEQ ID NO: 1814 - protein, 7 aa, synthetic construct
RGDRAAL

SEQ ID NO: 1815 - protein, 7 aa, synthetic construct
RGDRASL

SEQ ID NO: 1816 - protein, 7 aa, synthetic construct
RGDRGAL

SEQ ID NO: 1817 - protein, 7 aa, synthetic construct
RGDRGSL

SEQ ID NO: 1818 - protein, 7 aa, synthetic construct
RGDRQAL

SEQ ID NO: 1819 - protein, 7 aa, synthetic construct
RGDRQSL

SEQ ID NO: 1820 - protein, 7 aa, synthetic construct
RGDRQYL

SEQ ID NO: 1821 - protein, 7 aa, synthetic construct
RGDRQNL

SEQ ID NO: 1822 - protein, 7 aa, synthetic construct
RGDRGML

SEQ ID NO: 1823 - protein, 7 aa, synthetic construct
RGDRAAL

SEQ ID NO: 1824 - protein, 7 aa, synthetic construct
RGDRAYL

SEQ ID NO: 1825 - protein, 7 aa, synthetic construct
RGDRGSL

SEQ ID NO: 1826 - protein, 7 aa, synthetic construct
RGDRGYL

SEQ ID NO: 1827 - protein, 7 aa, synthetic construct
RGDRQAL

SEQ ID NO: 1828 - protein, 7 aa, synthetic construct
RGDRQSL

SEQ ID NO: 1829 - protein, 7 aa, synthetic construct
RGDRQYL

SEQ ID NO: 1830 - protein, 7 aa, synthetic construct
RGDRAAL

SEQ ID NO: 1831 - protein, 7 aa, synthetic construct
RGDRAYL

SEQ ID NO: 1832 - protein, 7 aa, synthetic construct
RGDRGAL

SEQ ID NO: 1833 - protein, 7 aa, synthetic construct
RGDRGSL

SEQ ID NO: 1834 - protein, 7 aa, synthetic construct
RGDRGYL

SEQ ID NO: 1835 - protein, 7 aa, synthetic construct
RGDRQAL

SEQ ID NO: 1836 - protein, 7 aa, synthetic construct
RGDRQYL

SEQ ID NO: 1837 - protein, 7 aa, synthetic construct
RGDRASL

SEQ ID NO: 1838 - protein, 7 aa, synthetic construct
RGDRGYL

SEQ ID NO: 1839 - protein, 7 aa, synthetic construct
RGDRQAL

SEQ ID NO: 1840 - protein, 7 aa, synthetic construct
RGDRQSL

SEQ ID NO: 1841 - protein, 7 aa, synthetic construct
RGDRQYL

SEQ ID NO: 1842 - protein, 7 aa, synthetic construct
RGDRAAL

SEQ ID NO: 1843 - protein, 7 aa, synthetic construct
RGDRAYL

SEQ ID NO: 1844 - protein, 7 aa, synthetic construct
RGDRGAL

SEQ ID NO: 1845 - protein, 7 aa, synthetic construct
RGDRQYL

SEQ ID NO: 1846 - protein, 7 aa, synthetic construct
RGDRAAL

SEQ ID NO: 1847 - protein, 7 aa, synthetic construct
RGDRASL

SEQ ID NO: 1848 - protein, 7 aa, synthetic construct
RGDRAYL

SEQ ID NO: 1849 - protein, 7 aa, synthetic construct
RGDRGAL

SEQ ID NO: 1850 - protein, 7 aa, synthetic construct
RGDRGSL

SEQ ID NO: 1851 - protein, 7 aa, synthetic construct
RGDRGYL

SEQ ID NO: 1852 - protein, 7 aa, synthetic construct
RGDRQAL

SEQ ID NO: 1853 - protein, 7 aa, synthetic construct
RGDRQSL

SEQ ID NO: 1854 - protein, 7 aa, synthetic construct
RGDRQYL

SEQ ID NO: 1855 - protein, 7 aa, synthetic construct
RGDRASL

SEQ ID NO: 1856 - protein, 7 aa, synthetic construct
RGDRAYL

SEQ ID NO: 1857 - protein, 7 aa, synthetic construct
RGDRGYL

SEQ ID NO: 1858 - protein, 7 aa, synthetic construct
RGDRQAL

SEQ ID NO: 1859 - protein, 7 aa, synthetic construct
RGDRQSL

SEQ ID NO: 1860 - protein, 7 aa, synthetic construct
RGDRQYL

SEQ ID NO: 1861 - protein, 7 aa, synthetic construct
RGDRGAL

SEQ ID NO: 1862 - protein, 7 aa, synthetic construct
RGDRASL

SEQ ID NO: 1863 - protein, 7 aa, synthetic construct
RGDRAYL

SEQ ID NO: 1864 - protein, 7 aa, synthetic construct
RGDRGAL

SEQ ID NO: 1865 - protein, 7 aa, synthetic construct
RGDRGIL

SEQ ID NO: 1866 - protein, 7 aa, synthetic construct
RGDRGSL

SEQ ID NO: 1867 - protein, 7 aa, synthetic construct
RGDRGYL

SEQ ID NO: 1868 - protein, 7 aa, synthetic construct
RGDRQAL

SEQ ID NO: 1869 - protein, 7 aa, synthetic construct
RGDRQSL

SEQ ID NO: 1870 - protein, 7 aa, synthetic construct
RGDRQYL

SEQ ID NO: 1871 - protein, 7 aa, synthetic construct
RGDRAAL

SEQ ID NO: 1872 - protein, 7 aa, synthetic construct
RGDRASL

SEQ ID NO: 1873 - protein, 7 aa, synthetic construct
RGDRAYL

SEQ ID NO: 1874 - protein, 7 aa, synthetic construct
RGDRGAL

SEQ ID NO: 1875 - protein, 7 aa, synthetic construct
RGDRGSL

SEQ ID NO: 1876 - protein, 7 aa, synthetic construct
RGDRGYL

SEQ ID NO: 1877 - protein, 7 aa, synthetic construct
RGDRQAL

SEQ ID NO: 1878 - protein, 7 aa, synthetic construct
RGDRQSL

SEQ ID NO: 1879 - protein, 7 aa, synthetic construct
RGDRQYL

SEQ ID NO: 1880 - protein, 7 aa, synthetic construct
RGDRAAL

SEQ ID NO: 1881 - protein, 7 aa, synthetic construct
RGDRASL

SEQ ID NO: 1882 - protein, 7 aa, synthetic construct
RGDRAYL

SEQ ID NO: 1883 - protein, 7 aa, synthetic construct
RGDRGAL

SEQ ID NO: 1884 - protein, 7 aa, synthetic construct
RGDRGSL

SEQ ID NO: 1885 - protein, 7 aa, synthetic construct
RGDRQAL

SEQ ID NO: 1886 - protein, 7 aa, synthetic construct
RGDRQSL

SEQ ID NO: 1887 - protein, 7 aa, synthetic construct
RGDRQYL

SEQ ID NO: 1888 - protein, 7 aa, synthetic construct
RGDRAAL

SEQ ID NO: 1889 - protein, 7 aa, synthetic construct
RGDRGAL

SEQ ID NO: 1890 - protein, 7 aa, synthetic construct
RGDRGSL

SEQ ID NO: 1891 - protein, 7 aa, synthetic construct
RGDRQAL

SEQ ID NO: 1892 - protein, 7 aa, synthetic construct
RGDRQSL

SEQ ID NO: 1893 - protein, 7 aa, synthetic construct
RGDRQYL

SEQ ID NO: 1894 - protein, 7 aa, synthetic construct
RGDRAAL

SEQ ID NO: 1895 - protein, 7 aa, synthetic construct
RGDRASL

SEQ ID NO: 1896 - protein, 7 aa, synthetic construct
RGDRGAL

SEQ ID NO: 1897 - protein, 7 aa, synthetic construct
RGDRGSL

SEQ ID NO: 1898 - protein, 7 aa, synthetic construct
RGDRQAL

SEQ ID NO: 1899 - protein, 7 aa, synthetic construct
RGDRQSL

SEQ ID NO: 1900 - protein, 7 aa, synthetic construct
RGDRQYL

SEQ ID NO: 1901 - protein, 7 aa, synthetic construct
RGDRAAL

SEQ ID NO: 1902 - protein, 7 aa, synthetic construct
RGDRASL

SEQ ID NO: 1903 - protein, 7 aa, synthetic construct
RGDRGAL

SEQ ID NO: 1904 - protein, 7 aa, synthetic construct
RGDRGSL

SEQ ID NO: 1905 - protein, 7 aa, synthetic construct
RGDRGYL

SEQ ID NO: 1906 - protein, 7 aa, synthetic construct
RGDRQAL

SEQ ID NO: 1907 - protein, 7 aa, synthetic construct
RGDRQSL

SEQ ID NO: 1908 - protein, 7 aa, synthetic construct
RGDRQYL

SEQ ID NO: 1909 - protein, 7 aa, synthetic construct
RGDRAAL

SEQ ID NO: 1910 - protein, 7 aa, synthetic construct
RGDRASL

SEQ ID NO: 1911 - protein, 7 aa, synthetic construct
RGDRAYL

SEQ ID NO: 1912 - protein, 7 aa, synthetic construct
RGDRGAL

SEQ ID NO: 1913 - protein, 7 aa, synthetic construct
RGDRGSL

SEQ ID NO: 1914 - protein, 7 aa, synthetic construct
RGDRGYL

SEQ ID NO: 1915 - protein, 7 aa, synthetic construct
RGDRQAL

SEQ ID NO: 1916 - protein, 7 aa, synthetic construct
RGDRQSL

SEQ ID NO: 1917 - protein, 7 aa, synthetic construct
RGDRQYL

SEQ ID NO: 1918 - protein, 7 aa, synthetic construct
RGDRAAL

SEQ ID NO: 1919 - protein, 7 aa, synthetic construct
RGDRASL

SEQ ID NO: 1920 - protein, 7 aa, synthetic construct
RGDRAYL

SEQ ID NO: 1921 - protein, 7 aa, synthetic construct
RGDRGAL

SEQ ID NO: 1922 - protein, 7 aa, synthetic construct
RGDRGSL

SEQ ID NO: 1923 - protein, 7 aa, synthetic construct
RGDRGYL

SEQ ID NO: 1924 - protein, 7 aa, synthetic construct
RGDRQAL

SEQ ID NO: 1925 - protein, 7 aa, synthetic construct
RGDRQSL

SEQ ID NO: 1926 - protein, 7 aa, synthetic construct
RGDRQYL

SEQ ID NO: 1927 - protein, 7 aa, synthetic construct
RGDRAAL

SEQ ID NO: 1928 - protein, 7 aa, synthetic construct
RGDRASL

SEQ ID NO: 1929 - protein, 7 aa, synthetic construct
RGDRAYL

SEQ ID NO: 1930 - protein, 7 aa, synthetic construct
RGDRGAL

SEQ ID NO: 1931 - protein, 7 aa, synthetic construct
RGDRGSL

SEQ ID NO: 1932 - protein, 7 aa, synthetic construct
RGDRQAL

SEQ ID NO: 1933 - protein, 7 aa, synthetic construct
RGDRQSL

SEQ ID NO: 1934 - protein, 7 aa, synthetic construct
RGDRQYL

SEQ ID NO: 1935 - protein, 7 aa, synthetic construct
RGDRAAL

SEQ ID NO: 1936 - protein, 7 aa, synthetic construct
RGDRGSL

SEQ ID NO: 1937 - protein, 7 aa, synthetic construct
RGDRQAL

SEQ ID NO: 1938 - protein, 7 aa, synthetic construct
RGDRQSL

SEQ ID NO: 1939 - protein, 7 aa, synthetic construct
RGDRQYL

SEQ ID NO: 1940 - protein, 7 aa, synthetic construct
RGDRAAL

SEQ ID NO: 1941 - protein, 7 aa, synthetic construct
RGDRASL

SEQ ID NO: 1942 - protein, 7 aa, synthetic construct
RGDRGAL

SEQ ID NO: 1943 - protein, 7 aa, synthetic construct
RGDRGSL

SEQ ID NO: 1944 - protein, 7 aa, synthetic construct
RGDRQAL

SEQ ID NO: 1945 - protein, 7 aa, synthetic construct
RGDRQSL

SEQ ID NO: 1946 - protein, 7 aa, synthetic construct
RGDRQYL

SEQ ID NO: 1947 - protein, 7 aa, synthetic construct
RGDRAAL

SEQ ID NO: 1948 - protein, 7 aa, synthetic construct
RGDRASL

SEQ ID NO: 1949 - protein, 7 aa, synthetic construct
RGDRAYL

SEQ ID NO: 1950 - protein, 7 aa, synthetic construct
RGDRGAL

SEQ ID NO: 1951 - protein, 7 aa, synthetic construct
RGDRGSL

SEQ ID NO: 1952 - protein, 7 aa, synthetic construct
RGDRQAL

SEQ ID NO: 1953 - protein, 7 aa, synthetic construct
RGDRQSL

SEQ ID NO: 1954 - protein, 7 aa, synthetic construct
RGDRGAL

SEQ ID NO: 1955 - protein, 7 aa, synthetic construct
RGDRGAL

SEQ ID NO: 1956 - protein, 7 aa, synthetic construct
RGDRGSL

SEQ ID NO: 1957 - protein, 7 aa, synthetic construct
RGDRQAL

SEQ ID NO: 1958 - protein, 7 aa, synthetic construct
RGDRQSL

SEQ ID NO: 1959 - protein, 7 aa, synthetic construct
RGDRQYL

SEQ ID NO: 1960 - protein, 7 aa, synthetic construct
RGDRAAL

SEQ ID NO: 1961 - protein, 7 aa, synthetic construct
RGDRASL

SEQ ID NO: 1962 - protein, 7 aa, synthetic construct
RGDRGAL

SEQ ID NO: 1963 - protein, 7 aa, synthetic construct
RGDRGSL

SEQ ID NO: 1964 - protein, 7 aa, synthetic construct
RGDRQAL

SEQ ID NO: 1965 - protein, 7 aa, synthetic construct
RGDRQSL

SEQ ID NO: 1966 - protein, 7 aa, synthetic construct
RGDRQYL

SEQ ID NO: 1967 - protein, 7 aa, synthetic construct
RGDRQAL

SEQ ID NO: 1968 - protein, 7 aa, synthetic construct
RGDRQSL

SEQ ID NO: 1969 - protein, 7 aa, synthetic construct
RGDRGAL

SEQ ID NO: 1970 - protein, 7 aa, synthetic construct
RGDRGSL

SEQ ID NO: 1971 - protein, 7 aa, synthetic construct
RGDRQAL

SEQ ID NO: 1972 - protein, 7 aa, synthetic construct
RGDRQSL

SEQ ID NO: 1973 - protein, 7 aa, synthetic construct
RGDRQYL

SEQ ID NO: 1974 - protein, 7 aa, synthetic construct
RGDRASL

SEQ ID NO: 1975 - protein, 7 aa, synthetic construct
RGDRGAL

SEQ ID NO: 1976 - protein, 7 aa, synthetic construct
RGDRGSL

SEQ ID NO: 1977 - protein, 7 aa, synthetic construct
RGDRQAL

SEQ ID NO: 1978 - protein, 7 aa, synthetic construct
RGDRQSL

SEQ ID NO: 1979 - protein, 7 aa, synthetic construct
RGDRQYL

SEQ ID NO: 1980 - protein, 7 aa, synthetic construct
RGDRQAL

SEQ ID NO: 1981 - protein, 7 aa, synthetic construct
RGDRQSL

SEQ ID NO: 1982 - protein, 7 aa, synthetic construct
RGDRAAL

SEQ ID NO: 1983 - protein, 7 aa, synthetic construct
RGDRAYL

SEQ ID NO: 1984 - protein, 7 aa, synthetic construct
RGDRGSL

SEQ ID NO: 1985 - protein, 7 aa, synthetic construct
RGDRGYL

SEQ ID NO: 1986 - protein, 7 aa, synthetic construct
RGDRQAL

SEQ ID NO: 1987 - protein, 7 aa, synthetic construct
RGDRQSL

SEQ ID NO: 1988 - protein, 7 aa, synthetic construct
RGDRQYL

SEQ ID NO: 1989 - protein, 7 aa, synthetic construct
RGDRAAL

SEQ ID NO: 1990 - protein, 7 aa, synthetic construct
RGDRASL

SEQ ID NO: 1991 - protein, 7 aa, synthetic construct
RGDRAYL

SEQ ID NO: 1992 - protein, 7 aa, synthetic construct
RGDRGSL

SEQ ID NO: 1993 - protein, 7 aa, synthetic construct
RGDRQAL

SEQ ID NO: 1994 - protein, 7 aa, synthetic construct
RGDRQSL

SEQ ID NO: 1995 - protein, 7 aa, synthetic construct
RGDRQYL

SEQ ID NO: 1996 - protein, 7 aa, synthetic construct
RGDRQLL

SEQ ID NO: 1997 - protein, 7 aa, synthetic construct
RGDRAAL

SEQ ID NO: 1998 - protein, 7 aa, synthetic construct
RGDRAYL

SEQ ID NO: 1999 - protein, 7 aa, synthetic construct
RGDRGAL

SEQ ID NO: 2000 - protein, 7 aa, synthetic construct
RGDRQAL

SEQ ID NO: 2001 - protein, 7 aa, synthetic construct
RGDRQSL

SEQ ID NO: 2002 - protein, 7 aa, synthetic construct
RGDRAAL

SEQ ID NO: 2003 - protein, 7 aa, synthetic construct
RGDRAAL

SEQ ID NO: 2004 - protein, 7 aa, synthetic construct
RGDRASL

SEQ ID NO: 2005 - protein, 7 aa, synthetic construct
RGDRAYL

SEQ ID NO: 2006 - protein, 7 aa, synthetic construct
RGDRGAL

SEQ ID NO: 2007 - protein, 7 aa, synthetic construct
RGDRGSL

SEQ ID NO: 2008 - protein, 7 aa, synthetic construct
RGDRQAL

SEQ ID NO: 2009 - protein, 7 aa, synthetic construct
RGDRQSL

SEQ ID NO: 2010 - protein, 7 aa, synthetic construct
RGDRQYL

SEQ ID NO: 2011 - protein, 7 aa, synthetic construct
RGDRAAL

SEQ ID NO: 2012 - protein, 7 aa, synthetic construct
RGDRASL

SEQ ID NO: 2013 - protein, 7 aa, synthetic construct
RGDRAYL

SEQ ID NO: 2014 - protein, 7 aa, synthetic construct
RGDRQAL

SEQ ID NO: 2015 - protein, 7 aa, synthetic construct
RGDRQSL

SEQ ID NO: 2016 - protein, 7 aa, synthetic construct
RGDRQYL

SEQ ID NO: 2017 - protein, 7 aa, synthetic construct
RGDRQNL

SEQ ID NO: 2018 - protein, 7 aa, synthetic construct
RGDRAYL

SEQ ID NO: 2019 - protein, 7 aa, synthetic construct
RGDRGYL

SEQ ID NO: 2020 - protein, 7 aa, synthetic construct
RGDRQAL

SEQ ID NO: 2021 - protein, 7 aa, synthetic construct
RGDRQSL

SEQ ID NO: 2022 - protein, 7 aa, synthetic construct
RGDRQYL

SEQ ID NO: 2023 - protein, 7 aa, synthetic construct
RGDRAAL

SEQ ID NO: 2024 - protein, 7 aa, synthetic construct
RGDRAYL

SEQ ID NO: 2025 - protein, 7 aa, synthetic construct
RGDRGAL

SEQ ID NO: 2026 - protein, 7 aa, synthetic construct
RGDRGSL

SEQ ID NO: 2027 - protein, 7 aa, synthetic construct
RGDRGYL

SEQ ID NO: 2028 - protein, 7 aa, synthetic construct
RGDRQAL

SEQ ID NO: 2029 - protein, 7 aa, synthetic construct
RGDRQSL

SEQ ID NO: 2030 - protein, 7 aa, synthetic construct
RGDRQYL

SEQ ID NO: 2031 - protein, 7 aa, synthetic construct
RGDRQAL

SEQ ID NO: 2032 - protein, 7 aa, synthetic construct
RGDRQSL

SEQ ID NO: 2033 - protein, 7 aa, synthetic construct
RGDRQYL

SEQ ID NO: 2034 - protein, 7 aa, synthetic construct
RGDRQYL

SEQ ID NO: 2035 - protein, 7 aa, synthetic construct
RGDRAYL

SEQ ID NO: 2036 - protein, 7 aa, synthetic construct
RGDRGAL

SEQ ID NO: 2037 - protein, 7 aa, synthetic construct
RGDRGYL

SEQ ID NO: 2038 - protein, 7 aa, synthetic construct
RGDRQAL

SEQ ID NO: 2039 - protein, 7 aa, synthetic construct
RGDRQSL

SEQ ID NO: 2040 - protein, 7 aa, synthetic construct
RGDRQYL

SEQ ID NO: 2041 - protein, 7 aa, synthetic construct
RGDRGYL

SEQ ID NO: 2042 - protein, 7 aa, synthetic construct
RGDRQAL

SEQ ID NO: 2043 - protein, 7 aa, synthetic construct
RGDRQYL

SEQ ID NO: 2044 - protein, 7 aa, synthetic construct
RGDRGAL

SEQ ID NO: 2045 - protein, 7 aa, synthetic construct
RGDRAAL

SEQ ID NO: 2046 - protein, 7 aa, synthetic construct
RGDRAYL

SEQ ID NO: 2047 - protein, 7 aa, synthetic construct
RGDRGSL

SEQ ID NO: 2048 - protein, 7 aa, synthetic construct
RGDRGYL

SEQ ID NO: 2049 - protein, 7 aa, synthetic construct
RGDRQAL

SEQ ID NO: 2050 - protein, 7 aa, synthetic construct
RGDRQSL

SEQ ID NO: 2051 - protein, 7 aa, synthetic construct
RGDRQYL

SEQ ID NO: 2052 - protein, 7 aa, synthetic construct
RGDRAAL

SEQ ID NO: 2053 - protein, 7 aa, synthetic construct
RGDRASL

SEQ ID NO: 2054 - protein, 7 aa, synthetic construct
RGDRAYL

SEQ ID NO: 2055 - protein, 7 aa, synthetic construct
RGDRGAL

SEQ ID NO: 2056 - protein, 7 aa, synthetic construct
RGDRGSL

SEQ ID NO: 2057 - protein, 7 aa, synthetic construct
RGDRQAL

SEQ ID NO: 2058 - protein, 7 aa, synthetic construct
RGDRQSL

SEQ ID NO: 2059 - protein, 7 aa, synthetic construct
RGDRQYL

SEQ ID NO: 2060 - protein, 7 aa, synthetic construct
RGDRAAL

SEQ ID NO: 2061 - protein, 7 aa, synthetic construct
RGDRASL

SEQ ID NO: 2062 - protein, 7 aa, synthetic construct
RGDRAYL

SEQ ID NO: 2063 - protein, 7 aa, synthetic construct
RGDRGSL

SEQ ID NO: 2064 - protein, 7 aa, synthetic construct
RGDRQAL

SEQ ID NO: 2065 - protein, 7 aa, synthetic construct
RGDRQSL

SEQ ID NO: 2066 - protein, 7 aa, synthetic construct
RGDRQYL

SEQ ID NO: 2067 - protein, 7 aa, synthetic construct
RGDRAAL

SEQ ID NO: 2068 - protein, 7 aa, synthetic construct
RGDRAAL

SEQ ID NO: 2069 - protein, 7 aa, synthetic construct
RGDRASL

SEQ ID NO: 2070 - protein, 7 aa, synthetic construct
RGDRQAL

SEQ ID NO: 2071 - protein, 7 aa, synthetic construct
RGDRQSL

SEQ ID NO: 2072 - protein, 7 aa, synthetic construct
RGDRQYL

SEQ ID NO: 2073 - protein, 7 aa, synthetic construct
RGDRAAL

SEQ ID NO: 2074 - protein, 7 aa, synthetic construct
RGDRAYL

SEQ ID NO: 2075 - protein, 7 aa, synthetic construct
RGDRQAL

SEQ ID NO: 2076 - protein, 7 aa, synthetic construct
RGDRQSL

SEQ ID NO: 2077 - protein, 7 aa, synthetic construct
RGDRQYL

SEQ ID NO: 2078 - protein, 7 aa, synthetic construct
RGDRAYL

SEQ ID NO: 2079 - protein, 7 aa, synthetic construct
RGDRAAL

SEQ ID NO: 2080 - protein, 7 aa, synthetic construct
RGDRQAL

SEQ ID NO: 2081 - protein, 7 aa, synthetic construct
RGDRQYL

SEQ ID NO: 2082 - protein, 7 aa, synthetic construct
RGDRAYL

SEQ ID NO: 2083 - protein, 7 aa, synthetic construct
RGDRQYL

SEQ ID NO: 2084 - protein, 7 aa, synthetic construct
RGDRGAL

SEQ ID NO: 2085 - protein, 7 aa, synthetic construct
RGDRAAL

SEQ ID NO: 2086 - protein, 7 aa, synthetic construct
RGDRGYL

SEQ ID NO: 2087 - protein, 7 aa, synthetic construct
RGDRQAL

SEQ ID NO: 2088 - protein, 7 aa, synthetic construct
RGDRQSL

SEQ ID NO: 2089 - protein, 7 aa, synthetic construct
RGDRAAL

SEQ ID NO: 2090 - protein, 7 aa, synthetic construct
RGDRASL

SEQ ID NO: 2091 - protein, 7 aa, synthetic construct
RGDRGSL

SEQ ID NO: 2092 - protein, 7 aa, synthetic construct
RGDRQAL

SEQ ID NO: 2093 - protein, 7 aa, synthetic construct
RGDRQSL

SEQ ID NO: 2094 - protein, 7 aa, synthetic construct
RGDRQAL

SEQ ID NO: 2095 - protein, 7 aa, synthetic construct
RGDRAAL

SEQ ID NO: 2096 - protein, 7 aa, synthetic construct
RGDRQAL

SEQ ID NO: 2097 - protein, 7 aa, synthetic construct
RGDRQSL

SEQ ID NO: 2098 - protein, 7 aa, synthetic construct
RGDRQYL

SEQ ID NO: 2099 - protein, 7 aa, synthetic construct
RGDRGAL

SEQ ID NO: 2100 - protein, 7 aa, synthetic construct
RGDRGAL

SEQ ID NO: 2101 - protein, 7 aa, synthetic construct
RGDRAAL

SEQ ID NO: 2102 - protein, 7 aa, synthetic construct
RGDRASL

SEQ ID NO: 2103 - protein, 7 aa, synthetic construct
RGDRAYL

SEQ ID NO: 2104 - protein, 7 aa, synthetic construct
RGDRGAL

SEQ ID NO: 2105 - protein, 7 aa, synthetic construct
RGDRGSL

SEQ ID NO: 2106 - protein, 7 aa, synthetic construct
RGDRGYL

SEQ ID NO: 2107 - protein, 7 aa, synthetic construct
RGDRQAL

SEQ ID NO: 2108 - protein, 7 aa, synthetic construct
RGDRQSL

SEQ ID NO: 2109 - protein, 7 aa, synthetic construct
RGDRQYL

SEQ ID NO: 2110 - protein, 7 aa, synthetic construct
RGDRAAL

SEQ ID NO: 2111 - protein, 7 aa, synthetic construct
RGDRASL

SEQ ID NO: 2112 - protein, 7 aa, synthetic construct
RGDRAYL

SEQ ID NO: 2113 - protein, 7 aa, synthetic construct
RGDRGAL

SEQ ID NO: 2114 - protein, 7 aa, synthetic construct
RGDRGSL

SEQ ID NO: 2115 - protein, 7 aa, synthetic construct
RGDRGYL

SEQ ID NO: 2116 - protein, 7 aa, synthetic construct
RGDRQAL

SEQ ID NO: 2117 - protein, 7 aa, synthetic construct
RGDRQSL

SEQ ID NO: 2118 - protein, 7 aa, synthetic construct
RGDRQYL

SEQ ID NO: 2119 - protein, 7 aa, synthetic construct
RGDRQLL

SEQ ID NO: 2120 - protein, 7 aa, synthetic construct
RGDRAAL

SEQ ID NO: 2121 - protein, 7 aa, synthetic construct
RGDRASL

SEQ ID NO: 2122 - protein, 7 aa, synthetic construct
RGDRGAL

SEQ ID NO: 2123 - protein, 7 aa, synthetic construct
RGDRGSL

SEQ ID NO: 2124 - protein, 7 aa, synthetic construct
RGDRQAL

SEQ ID NO: 2125 - protein, 7 aa, synthetic construct
RGDRQSL

SEQ ID NO: 2126 - protein, 7 aa, synthetic construct
RGDRAAL

SEQ ID NO: 2127 - protein, 7 aa, synthetic construct
RGDRASL

SEQ ID NO: 2128 - protein, 7 aa, synthetic construct
RGDRAYL

SEQ ID NO: 2129 - protein, 7 aa, synthetic construct
RGDRGAL

SEQ ID NO: 2130 - protein, 7 aa, synthetic construct
RGDRGSL

SEQ ID NO: 2131 - protein, 7 aa, synthetic construct
RGDRQAL

SEQ ID NO: 2132 - protein, 7 aa, synthetic construct
RGDRQSL

SEQ ID NO: 2133 - protein, 7 aa, synthetic construct
RGDRQYL

SEQ ID NO: 2134 - protein, 7 aa, synthetic construct
RGDRAAL

SEQ ID NO: 2135 - protein, 7 aa, synthetic construct
RGDRASL

SEQ ID NO: 2136 - protein, 7 aa, synthetic construct
RGDRAYL

SEQ ID NO: 2137 - protein, 7 aa, synthetic construct
RGDRGAL

SEQ ID NO: 2138 - protein, 7 aa, synthetic construct
RGDRGSL

SEQ ID NO: 2139 - protein, 7 aa, synthetic construct
RGDRGYL

SEQ ID NO: 2140 - protein, 7 aa, synthetic construct
RGDRQAL

SEQ ID NO: 2141 - protein, 7 aa, synthetic construct
RGDRQSL

SEQ ID NO: 2142 - protein, 7 aa, synthetic construct
RGDRQYL

SEQ ID NO: 2143 - protein, 7 aa, synthetic construct
RGDRAAL

SEQ ID NO: 2144 - protein, 7 aa, synthetic construct
RGDRASL

SEQ ID NO: 2145 - protein, 7 aa, synthetic construct
RGDRAYL

SEQ ID NO: 2146 - protein, 7 aa, synthetic construct
RGDRGSL

SEQ ID NO: 2147 - protein, 7 aa, synthetic construct
RGDRGYL

SEQ ID NO: 2148 - protein, 7 aa, synthetic construct
RGDRQAL

SEQ ID NO: 2149 - protein, 7 aa, synthetic construct
RGDRQSL

SEQ ID NO: 2150 - protein, 7 aa, synthetic construct
RGDRQYL

SEQ ID NO: 2151 - protein, 7 aa, synthetic construct
RGDRQNL

SEQ ID NO: 2152 - protein, 7 aa, synthetic construct
RGDRGML

SEQ ID NO: 2153 - protein, 7 aa, synthetic construct
RGDRGYL

SEQ ID NO: 2154 - protein, 7 aa, synthetic construct
RGDRQAL

SEQ ID NO: 2155 - protein, 7 aa, synthetic construct
RGDRQSL

SEQ ID NO: 2156 - protein, 7 aa, synthetic construct
RGDRQYL

SEQ ID NO: 2157 - protein, 7 aa, synthetic construct
RGDRASL

SEQ ID NO: 2158 - protein, 7 aa, synthetic construct
RGDRAYL

SEQ ID NO: 2159 - protein, 7 aa, synthetic construct
RGDRGAL

SEQ ID NO: 2160 - protein, 7 aa, synthetic construct
RGDRGSL

SEQ ID NO: 2161 - protein, 7 aa, synthetic construct
RGDRGYL

SEQ ID NO: 2162 - protein, 7 aa, synthetic construct
RGDRQAL

SEQ ID NO: 2163 - protein, 7 aa, synthetic construct
RGDRQSL

SEQ ID NO: 2164 - protein, 7 aa, synthetic construct
RGDRQYL

SEQ ID NO: 2165 - protein, 7 aa, synthetic construct
RGDRAYL

SEQ ID NO: 2166 - protein, 7 aa, synthetic construct
RGDRGYL

SEQ ID NO: 2167 - protein, 7 aa, synthetic construct
RGDRQAL

SEQ ID NO: 2168 - protein, 7 aa, synthetic construct
RGDRQSL

SEQ ID NO: 2169 - protein, 7 aa, synthetic construct
RGDRQYL

SEQ ID NO: 2170 - protein, 7 aa, synthetic construct
RGDRGYL

SEQ ID NO: 2171 - protein, 7 aa, synthetic construct
RGDRQYL

SEQ ID NO: 2172 - protein, 7 aa, synthetic construct
RGDRAAL

SEQ ID NO: 2173 - protein, 7 aa, synthetic construct
RGDRASL

SEQ ID NO: 2174 - protein, 7 aa, synthetic construct
RGDRGAL

SEQ ID NO: 2175 - protein, 7 aa, synthetic construct
RGDRGYL

SEQ ID NO: 2176 - protein, 7 aa, synthetic construct
RGDRQAL

SEQ ID NO: 2177 - protein, 7 aa, synthetic construct
RGDRQSL

SEQ ID NO: 2178 - protein, 7 aa, synthetic construct
RGDRQYL

SEQ ID NO: 2179 - protein, 7 aa, synthetic construct
RGDRGYL

SEQ ID NO: 2180 - protein, 7 aa, synthetic construct
RGDRQAL

SEQ ID NO: 2181 - protein, 7 aa, synthetic construct
RGDRQSL

SEQ ID NO: 2182 - protein, 7 aa, synthetic construct
RGDRQYL

SEQ ID NO: 2183 - protein, 7 aa, synthetic construct
RGDRGAL

SEQ ID NO: 2184 - protein, 7 aa, synthetic construct
RGDRAYL

SEQ ID NO: 2185 - protein, 7 aa, synthetic construct
RGDRGAL

SEQ ID NO: 2186 - protein, 7 aa, synthetic construct
RGDRGIL

SEQ ID NO: 2187 - protein, 7 aa, synthetic construct
RGDRGSL

SEQ ID NO: 2188 - protein, 7 aa, synthetic construct
RGDRGYL

SEQ ID NO: 2189 - protein, 7 aa, synthetic construct
RGDRQAL

SEQ ID NO: 2190 - protein, 7 aa, synthetic construct
RGDRQSL

SEQ ID NO: 2191 - protein, 7 aa, synthetic construct
RGDRQYL

SEQ ID NO: 2192 - protein, 7 aa, synthetic construct
RGDRAAL

SEQ ID NO: 2193 - protein, 7 aa, synthetic construct
RGDRAYL

SEQ ID NO: 2194 - protein, 7 aa, synthetic construct
RGDRGAL

SEQ ID NO: 2195 - protein, 7 aa, synthetic construct
RGDRGSL

SEQ ID NO: 2196 - protein, 7 aa, synthetic construct
RGDRGYL

SEQ ID NO: 2197 - protein, 7 aa, synthetic construct
RGDRQAL

SEQ ID NO: 2198 - protein, 7 aa, synthetic construct
RGDRQSL

SEQ ID NO: 2199 - protein, 7 aa, synthetic construct
RGDRQYL

SEQ ID NO: 2200 - protein, 7 aa, synthetic construct
RGDRAAL

SEQ ID NO: 2201 - protein, 7 aa, synthetic construct
RGDRASL

SEQ ID NO: 2202 - protein, 7 aa, synthetic construct
RGDRAYL

SEQ ID NO: 2203 - protein, 7 aa, synthetic construct
RGDRGSL

SEQ ID NO: 2204 - protein, 7 aa, synthetic construct
RGDRQAL

SEQ ID NO: 2205 - protein, 7 aa, synthetic construct
RGDRQSL

SEQ ID NO: 2206 - protein, 7 aa, synthetic construct
RGDRQYL

SEQ ID NO: 2207 - protein, 7 aa, synthetic construct
RGDRAAL

SEQ ID NO: 2208 - protein, 7 aa, synthetic construct
RGDRGSL

SEQ ID NO: 2209 - protein, 7 aa, synthetic construct
RGDRQAL

SEQ ID NO: 2210 - protein, 7 aa, synthetic construct
RGDRQSL

SEQ ID NO: 2211 - protein, 7 aa, synthetic construct
RGDRQYL

SEQ ID NO: 2212 - protein, 7 aa, synthetic construct
RGDRAAL

SEQ ID NO: 2213 - protein, 7 aa, synthetic construct
RGDRASL

SEQ ID NO: 2214 - protein, 7 aa, synthetic construct
RGDRGSL

SEQ ID NO: 2215 - protein, 7 aa, synthetic construct
RGDRGYL

SEQ ID NO: 2216 - protein, 7 aa, synthetic construct
RGDRQAL

SEQ ID NO: 2217 - protein, 7 aa, synthetic construct
RGDRQSL

SEQ ID NO: 2218 - protein, 7 aa, synthetic construct
RGDRQYL

SEQ ID NO: 2219 - protein, 7 aa, synthetic construct
RGDRQAL

SEQ ID NO: 2220 - protein, 7 aa, synthetic construct
RGDRQSL

SEQ ID NO: 2221 - protein, 7 aa, synthetic construct
RGDRQYL

SEQ ID NO: 2222 - protein, 7 aa, synthetic construct
RGDRAAL

SEQ ID NO: 2223 - protein, 7 aa, synthetic construct
RGDRGAL

SEQ ID NO: 2224 - protein, 7 aa, synthetic construct
RGDRGSL

SEQ ID NO: 2225 - protein, 7 aa, synthetic construct
RGDRGYL

SEQ ID NO: 2226 - protein, 7 aa, synthetic construct
RGDRQAL

SEQ ID NO: 2227 - protein, 7 aa, synthetic construct
RGDRQSL

SEQ ID NO: 2228 - protein, 7 aa, synthetic construct
RGDRQYL

SEQ ID NO: 2229 - protein, 7 aa, synthetic construct
RGDRAAL

SEQ ID NO: 2230 - protein, 7 aa, synthetic construct
RGDRASL

SEQ ID NO: 2231 - protein, 7 aa, synthetic construct
RGDRGAL

SEQ ID NO: 2232 - protein, 7 aa, synthetic construct
RGDRGSL

SEQ ID NO: 2233 - protein, 7 aa, synthetic construct
RGDRGYL

SEQ ID NO: 2234 - protein, 7 aa, synthetic construct
RGDRQAL

SEQ ID NO: 2235 - protein, 7 aa, synthetic construct
RGDRQSL

SEQ ID NO: 2236 - protein, 7 aa, synthetic construct
RGDRQYL

SEQ ID NO: 2237 - protein, 7 aa, synthetic construct
RGDRAYL

SEQ ID NO: 2238 - protein, 7 aa, synthetic construct
RGDRGSL

SEQ ID NO: 2239 - protein, 7 aa, synthetic construct
RGDRQAL

SEQ ID NO: 2240 - protein, 7 aa, synthetic construct
RGDRQSL

SEQ ID NO: 2241 - protein, 7 aa, synthetic construct
RGDRQAL

SEQ ID NO: 2242 - protein, 7 aa, synthetic construct
RGDRQAL

SEQ ID NO: 2243 - protein, 7 aa, synthetic construct
RGDRQSL

SEQ ID NO: 2244 - protein, 7 aa, synthetic construct
RGDRQYL

SEQ ID NO: 2245 - protein, 7 aa, synthetic construct
RGDRAYL

SEQ ID NO: 2246 - protein, 7 aa, synthetic construct
RGDRQAL

SEQ ID NO: 2247 - protein, 7 aa, synthetic construct
RGDRQSL

SEQ ID NO: 2248 - protein, 7 aa, synthetic construct
RGDRQYL

SEQ ID NO: 2249 - protein, 7 aa, synthetic construct
RGDRGAL

SEQ ID NO: 2250 - protein, 7 aa, synthetic construct
RGDRAAL

SEQ ID NO: 2251 - protein, 7 aa, synthetic construct
RGDRASL

SEQ ID NO: 2252 - protein, 7 aa, synthetic construct
RGDRGAL

SEQ ID NO: 2253 - protein, 7 aa, synthetic construct
RGDRGSL

SEQ ID NO: 2254 - protein, 7 aa, synthetic construct
RGDRQAL

SEQ ID NO: 2255 - protein, 7 aa, synthetic construct
RGDRQSL

SEQ ID NO: 2256 - protein, 7 aa, synthetic construct
RGDRQYL

SEQ ID NO: 2257 - protein, 7 aa, synthetic construct
RGDRAAL

SEQ ID NO: 2258 - protein, 7 aa, synthetic construct
RGDRGAL

SEQ ID NO: 2259 - protein, 7 aa, synthetic construct
RGDRGSL

SEQ ID NO: 2260 - protein, 7 aa, synthetic construct
RGDRQAL

SEQ ID NO: 2261 - protein, 7 aa, synthetic construct
RGDRQSL

SEQ ID NO: 2262 - protein, 7 aa, synthetic construct
RGDRAAL

SEQ ID NO: 2263 - protein, 7 aa, synthetic construct
RGDRASL

SEQ ID NO: 2264 - protein, 7 aa, synthetic construct
RGDRGSL

SEQ ID NO: 2265 - protein, 7 aa, synthetic construct
RGDRQAL

SEQ ID NO: 2266 - protein, 7 aa, synthetic construct
RGDRQSL

SEQ ID NO: 2267 - protein, 7 aa, synthetic construct
RGDRGAL

SEQ ID NO: 2268 - protein, 7 aa, synthetic construct
RGDRGSL

SEQ ID NO: 2269 - protein, 7 aa, synthetic construct
RGDRQAL

SEQ ID NO: 2270 - protein, 7 aa, synthetic construct
RGDRQSL

SEQ ID NO: 2271 - protein, 7 aa, synthetic construct
RGDRAAL

SEQ ID NO: 2272 - protein, 7 aa, synthetic construct
RGDRGAL

SEQ ID NO: 2273 - protein, 7 aa, synthetic construct
RGDRGSL

SEQ ID NO: 2274 - protein, 7 aa, synthetic construct
RGDRQAL

SEQ ID NO: 2275 - protein, 7 aa, synthetic construct
RGDRQSL

SEQ ID NO: 2276 - protein, 7 aa, synthetic construct
RGDRQYL

SEQ ID NO: 2277 - protein, 7 aa, synthetic construct
RGDRQAL

SEQ ID NO: 2278 - protein, 7 aa, synthetic construct
RGDRQSL

SEQ ID NO: 2279 - protein, 7 aa, synthetic construct
RGDRQYL

SEQ ID NO: 2280 - protein, 7 aa, synthetic construct
RGDRGAL

SEQ ID NO: 2281 - protein, 7 aa, synthetic construct
RGDRAAL

SEQ ID NO: 2282 - protein, 7 aa, synthetic construct
RGDRGAL

SEQ ID NO: 2283 - protein, 7 aa, synthetic construct
RGDRGSL

SEQ ID NO: 2284 - protein, 7 aa, synthetic construct
RGDRGYL

SEQ ID NO: 2285 - protein, 7 aa, synthetic construct
RGDRQAL

SEQ ID NO: 2286 - protein, 7 aa, synthetic construct
RGDRQYL

SEQ ID NO: 2287 - protein, 7 aa, synthetic construct
RGDRAAL

SEQ ID NO: 2288 - protein, 7 aa, synthetic construct
RGDRAYL

SEQ ID NO: 2289 - protein, 7 aa, synthetic construct
RGDRGAL

SEQ ID NO: 2290 - protein, 7 aa, synthetic construct
RGDRGSL

SEQ ID NO: 2291 - protein, 7 aa, synthetic construct
RGDRGYL

SEQ ID NO: 2292 - protein, 7 aa, synthetic construct
RGDRQAL

SEQ ID NO: 2293 - protein, 7 aa, synthetic construct
RGDRQYL

SEQ ID NO: 2294 - protein, 7 aa, synthetic construct
RGDRAYL

SEQ ID NO: 2295 - protein, 7 aa, synthetic construct
RGDRQAL

SEQ ID NO: 2296 - protein, 7 aa, synthetic construct
RGDRQSL

SEQ ID NO: 2297 - protein, 7 aa, synthetic construct
RGDRGSL

SEQ ID NO: 2298 - protein, 7 aa, synthetic construct
RGDRQAL

SEQ ID NO: 2299 - protein, 7 aa, synthetic construct
RGDRQYL

SEQ ID NO: 2300 - protein, 7 aa, synthetic construct
RGDRAAL

SEQ ID NO: 2301 - protein, 7 aa, synthetic construct
RGDRGAL

SEQ ID NO: 2302 - protein, 7 aa, synthetic construct
RGDRGSL

SEQ ID NO: 2303 - protein, 7 aa, synthetic construct
RGDRGYL

SEQ ID NO: 2304 - protein, 7 aa, synthetic construct
RGDRQAL

SEQ ID NO: 2305 - protein, 7 aa, synthetic construct
RGDRQSL

SEQ ID NO: 2306 - protein, 7 aa, synthetic construct
RGDRQYL

SEQ ID NO: 2307 - protein, 7 aa, synthetic construct
RGDRGSL

SEQ ID NO: 2308 - protein, 7 aa, synthetic construct
RGDRGYL

SEQ ID NO: 2309 - protein, 7 aa, synthetic construct
RGDRQAL

SEQ ID NO: 2310 - protein, 7 aa, synthetic construct
RGDRQSL

SEQ ID NO: 2311 - protein, 7 aa, synthetic construct
RGDRQYL

SEQ ID NO: 2312 - protein, 7 aa, synthetic construct
RGDRQNL

SEQ ID NO: 2313 - protein, 7 aa, synthetic construct
RGDRGML

SEQ ID NO: 2314 - protein, 7 aa, synthetic construct
RGDRAYL

SEQ ID NO: 2315 - protein, 7 aa, synthetic construct
RGDRGAL

SEQ ID NO: 2316 - protein, 7 aa, synthetic construct
RGDRGSL

SEQ ID NO: 2317 - protein, 7 aa, synthetic construct
RGDRGYL

SEQ ID NO: 2318 - protein, 7 aa, synthetic construct
RGDRQAL

SEQ ID NO: 2319 - protein, 7 aa, synthetic construct
RGDRQSL

SEQ ID NO: 2320 - protein, 7 aa, synthetic construct
RGDRQYL

SEQ ID NO: 2321 - protein, 7 aa, synthetic construct
RGDRAAL

SEQ ID NO: 2322 - protein, 7 aa, synthetic construct
RGDRASL

SEQ ID NO: 2323 - protein, 7 aa, synthetic construct
RGDRAYL

SEQ ID NO: 2324 - protein, 7 aa, synthetic construct
RGDRGAL

SEQ ID NO: 2325 - protein, 7 aa, synthetic construct
RGDRGSL

SEQ ID NO: 2326 - protein, 7 aa, synthetic construct
RGDRGYL

SEQ ID NO: 2327 - protein, 7 aa, synthetic construct
RGDRQAL

SEQ ID NO: 2328 - protein, 7 aa, synthetic construct
RGDRQSL

SEQ ID NO: 2329 - protein, 7 aa, synthetic construct
RGDRQYL

SEQ ID NO: 2330 - protein, 7 aa, synthetic construct
RGDRGYL

SEQ ID NO: 2331 - protein, 7 aa, synthetic construct
RGDRQAL

SEQ ID NO: 2332 - protein, 7 aa, synthetic construct
RGDRQSL

SEQ ID NO: 2333 - protein, 7 aa, synthetic construct
RGDRQYL

SEQ ID NO: 2334 - protein, 7 aa, synthetic construct
RGDRAYL

SEQ ID NO: 2335 - protein, 7 aa, synthetic construct
RGDRGAL

SEQ ID NO: 2336 - protein, 7 aa, synthetic construct
RGDRGSL

SEQ ID NO: 2337 - protein, 7 aa, synthetic construct
RGDRQAL

SEQ ID NO: 2338 - protein, 7 aa, synthetic construct
RGDRQSL

SEQ ID NO: 2339 - protein, 7 aa, synthetic construct
RGDRQYL

SEQ ID NO: 2340 - protein, 7 aa, synthetic construct
RGDRAAL

SEQ ID NO: 2341 - protein, 7 aa, synthetic construct
RGDRAYL

SEQ ID NO: 2342 - protein, 7 aa, synthetic construct
RGDRGAL

SEQ ID NO: 2343 - protein, 7 aa, synthetic construct
RGDRGYL

SEQ ID NO: 2344 - protein, 7 aa, synthetic construct
RGDRQAL

SEQ ID NO: 2345 - protein, 7 aa, synthetic construct
RGDRQSL

SEQ ID NO: 2346 - protein, 7 aa, synthetic construct
RGDRQYL

SEQ ID NO: 2347 - protein, 7 aa, synthetic construct
RGDRAYL

SEQ ID NO: 2348 - protein, 7 aa, synthetic construct
RGDRQAL

SEQ ID NO: 2349 - protein, 7 aa, synthetic construct
RGDRQSL

SEQ ID NO: 2350 - protein, 7 aa, synthetic construct
RGDRQYL

SEQ ID NO: 2351 - protein, 7 aa, synthetic construct
RGDRGAL

SEQ ID NO: 2352 - protein, 7 aa, synthetic construct
RGDRGAL

SEQ ID NO: 2353 - protein, 7 aa, synthetic construct
RGDRGSL

SEQ ID NO: 2354 - protein, 7 aa, synthetic construct
RGDRGYL

SEQ ID NO: 2355 - protein, 7 aa, synthetic construct
RGDRQAL

SEQ ID NO: 2356 - protein, 7 aa, synthetic construct
RGDRQSL

SEQ ID NO: 2357 - protein, 7 aa, synthetic construct
RGDRQYL

SEQ ID NO: 2358 - protein, 7 aa, synthetic construct
RGDRAAL

SEQ ID NO: 2359 - protein, 7 aa, synthetic construct
RGDRAYL

SEQ ID NO: 2360 - protein, 7 aa, synthetic construct
RGDRGAL

SEQ ID NO: 2361 - protein, 7 aa, synthetic construct
RGDRQAL

SEQ ID NO: 2362 - protein, 7 aa, synthetic construct
RGDRQSL

SEQ ID NO: 2363 - protein, 7 aa, synthetic construct
RGDRQYL

SEQ ID NO: 2364 - protein, 7 aa, synthetic construct
RGDRAYL

SEQ ID NO: 2365 - protein, 7 aa, synthetic construct
RGDRQAL

SEQ ID NO: 2366 - protein, 7 aa, synthetic construct
RGDRQSL

SEQ ID NO: 2367 - protein, 7 aa, synthetic construct
RGDRQYL

SEQ ID NO: 2368 - protein, 7 aa, synthetic construct
RGDRGSL

SEQ ID NO: 2369 - protein, 7 aa, synthetic construct
RGDRQAL

SEQ ID NO: 2370 - protein, 7 aa, synthetic construct
RGDRQSL

SEQ ID NO: 2371 - protein, 7 aa, synthetic construct
RGDRGAL

SEQ ID NO: 2372 - protein, 7 aa, synthetic construct
RGDRQAL

SEQ ID NO: 2373 - protein, 7 aa, synthetic construct
RGDRQSL

SEQ ID NO: 2374 - protein, 7 aa, synthetic construct
RGDRQYL

SEQ ID NO: 2375 - protein, 7 aa, synthetic construct
RGDRAYL

SEQ ID NO: 2376 - protein, 7 aa, synthetic construct
RGDRQAL

SEQ ID NO: 2377 - protein, 7 aa, synthetic construct
RGDRQSL

SEQ ID NO: 2378 - protein, 7 aa, synthetic construct
RGDRAYL

SEQ ID NO: 2379 - protein, 7 aa, synthetic construct
RGDRAAL

SEQ ID NO: 2380 - protein, 7 aa, synthetic construct
RGDRGAL

SEQ ID NO: 2381 - protein, 7 aa, synthetic construct
RGDRGSL

SEQ ID NO: 2382 - protein, 7 aa, synthetic construct
RGDRGYL

SEQ ID NO: 2383 - protein, 7 aa, synthetic construct
RGDRQAL

SEQ ID NO: 2384 - protein, 7 aa, synthetic construct
RGDRQSL

SEQ ID NO: 2385 - protein, 7 aa, synthetic construct
RGDRQYL

SEQ ID NO: 2386 - protein, 7 aa, synthetic construct
RGDRAYL

SEQ ID NO: 2387 - protein, 7 aa, synthetic construct
RGDRGAL

SEQ ID NO: 2388 - protein, 7 aa, synthetic construct
RGDRGAL

SEQ ID NO: 2389 - protein, 7 aa, synthetic construct
RGDRGSL

SEQ ID NO: 2390 - protein, 7 aa, synthetic construct
RGDRQAL

SEQ ID NO: 2391 - protein, 7 aa, synthetic construct
RGDRQSL

SEQ ID NO: 2392 - protein, 7 aa, synthetic construct
RGDRAAL

SEQ ID NO: 2393 - protein, 7 aa, synthetic construct
RGDRGAL

SEQ ID NO: 2394 - protein, 7 aa, synthetic construct
RGDRQAL

SEQ ID NO: 2395 - protein, 7 aa, synthetic construct
RGDRQSL

SEQ ID NO: 2396 - protein, 7 aa, synthetic construct
RGDRQYL

SEQ ID NO: 2397 - protein, 7 aa, synthetic construct
RGDRGSL

SEQ ID NO: 2398 - protein, 7 aa, synthetic construct
RGDRGYL

SEQ ID NO: 2399 - DNA, 21 bp, synthetic construct
  source 1..21: mol_type = other DNA
gccgtcctcgtccccgggctt

SEQ ID NO: 2400 - DNA, 21 bp, synthetic construct
  source 1..21: mol_type = other DNA
gccgtcctcgtccccgggctt

SEQ ID NO: 2401 - DNA, 21 bp, synthetic construct
  source 1..21: mol_type = other DNA
gccgtcctcgtccccgggctt

SEQ ID NO: 2402 - DNA, 21 bp, synthetic construct
  source 1..21: mol_type = other DNA
gccgtcctcgtccccgggctt

SEQ ID NO: 2403 - DNA, 21 bp, synthetic construct
  source 1..21: mol_type = other DNA
gccgtcctcgtccccgggctt

SEQ ID NO: 2404 - DNA, 21 bp, synthetic construct
  source 1..21: mol_type = other DNA
gccgtcctcgtccccgggctt

SEQ ID NO: 2405 - DNA, 21 bp, synthetic construct
  source 1..21: mol_type = other DNA
gccgtcctcgtccccgggctt

SEQ ID NO: 2406 - DNA, 21 bp, synthetic construct
  source 1..21: mol_type = other DNA
gccgtcctcgtccccgggctt

SEQ ID NO: 2407 - DNA, 21 bp, synthetic construct
  source 1..21: mol_type = other DNA
ggcctcgctttggctcggggt

SEQ ID NO: 2408 - DNA, 21 bp, synthetic construct
  source 1..21: mol_type = other DNA
ggcctcgctttggctcggggt

SEQ ID NO: 2409 - DNA, 21 bp, synthetic construct
  source 1..21: mol_type = other DNA
ggcctcgctttggctcggggt

SEQ ID NO: 2410 - DNA, 21 bp, synthetic construct
  source 1..21: mol_type = other DNA
ggcctcgctttggctcggggt

SEQ ID NO: 2411 - DNA, 21 bp, synthetic construct
  source 1..21: mol_type = other DNA
ggcctcgctttggctcggggt

SEQ ID NO: 2412 - DNA, 21 bp, synthetic construct
  source 1..21: mol_type = other DNA
ggcctcgctttggctcggggt

SEQ ID NO: 2413 - DNA, 21 bp, synthetic construct
  source 1..21: mol_type = other DNA
ggcctcgctttggctcggggt

SEQ ID NO: 2414 - DNA, 21 bp, synthetic construct
  source 1..21: mol_type = other DNA
ggcctcgctttggctcggggt

SEQ ID NO: 2415 - DNA, 21 bp, synthetic construct
  source 1..21: mol_type = other DNA
cagggcctcgctttggctcgg

SEQ ID NO: 2416 - DNA, 21 bp, synthetic construct
  source 1..21: mol_type = other DNA
cagggcctcgctttggctcgg

SEQ ID NO: 2417 - DNA, 21 bp, synthetic construct
  source 1..21: mol_type = other DNA
cagggcctcgctttggctcgg

SEQ ID NO: 2418 - DNA, 21 bp, synthetic construct
  source 1..21: mol_type = other DNA
cagggcctcgctttggctcgg

SEQ ID NO: 2419 - DNA, 21 bp, synthetic construct
  source 1..21: mol_type = other DNA
cagggcctcgctttggctcgg

SEQ ID NO: 2420 - DNA, 21 bp, synthetic construct
  source 1..21: mol_type = other DNA
cagggcctcgctttggctcgg

SEQ ID NO: 2421 - DNA, 21 bp, synthetic construct
  source 1..21: mol_type = other DNA
cagggcctcgctttggctcgg

SEQ ID NO: 2422 - DNA, 21 bp, synthetic construct
  source 1..21: mol_type = other DNA
cagggcctcgctttggctcgg

SEQ ID NO: 2423 - DNA, 21 bp, synthetic construct
  source 1..21: mol_type = other DNA
ggccttctggcgggccgcgtc

SEQ ID NO: 2424 - DNA, 21 bp, synthetic construct
  source 1..21: mol_type = other DNA
ggccttctggcgggccgcgtc

SEQ ID NO: 2425 - DNA, 21 bp, synthetic construct
  source 1..21: mol_type = other DNA
ggccttctggcgggccgcgtc

SEQ ID NO: 2426 - DNA, 21 bp, synthetic construct
  source 1..21: mol_type = other DNA
ggccttctggcgggccgcgtc

SEQ ID NO: 2427 - DNA, 21 bp, synthetic construct
  source 1..21: mol_type = other DNA
ggccttctggcgggccgcgtc

SEQ ID NO: 2428 - DNA, 21 bp, synthetic construct
  source 1..21: mol_type = other DNA
ggccttctggcgggccgcgtc

SEQ ID NO: 2429 - DNA, 21 bp, synthetic construct
  source 1..21: mol_type = other DNA
ggccttctggcgggccgcgtc

SEQ ID NO: 2430 - DNA, 21 bp, synthetic construct
  source 1..21: mol_type = other DNA
ggccttctggcgggccgcgtc

SEQ ID NO: 2431 - DNA, 21 bp, synthetic construct
  source 1..21: mol_type = other DNA
agctcctcccgggcggcgatg

SEQ ID NO: 2432 - DNA, 21 bp, synthetic construct
  source 1..21: mol_type = other DNA
agctcctcccgggcggcgatg

SEQ ID NO: 2433 - DNA, 21 bp, synthetic construct
  source 1..21: mol_type = other DNA
agctcctcccgggcggcgatg

SEQ ID NO: 2434 - DNA, 21 bp, synthetic construct
  source 1..21: mol_type = other DNA
agctcctcccgggcggcgatg

SEQ ID NO: 2435 - DNA, 21 bp, synthetic construct
  source 1..21: mol_type = other DNA
agctcctcccgggcggcgatg

SEQ ID NO: 2436 - DNA, 21 bp, synthetic construct
  source 1..21: mol_type = other DNA
agctcctcccgggcggcgatg

SEQ ID NO: 2437 - DNA, 21 bp, synthetic construct
  source 1..21: mol_type = other DNA
agctcctcccgggcggcgatg

SEQ ID NO: 2438 - DNA, 21 bp, synthetic construct
  source 1..21: mol_type = other DNA
agctcctcccgggcggcgatg

SEQ ID NO: 2439 - DNA, 21 bp, synthetic construct
  source 1..21: mol_type = other DNA
aggccgcctgcctgcgcgggc

SEQ ID NO: 2440 - DNA, 21 bp, synthetic construct
  source 1..21: mol_type = other DNA
aggccgcctgcctgcgcgggc

SEQ ID NO: 2441 - DNA, 21 bp, synthetic construct
  source 1..21: mol_type = other DNA
aggccgcctgcctgcgcgggc

SEQ ID NO: 2442 - DNA, 21 bp, synthetic construct
  source 1..21: mol_type = other DNA
aggccgcctgcctgcgcgggc

SEQ ID NO: 2443 - DNA, 21 bp, synthetic construct
  source 1..21: mol_type = other DNA
aggccgcctgcctgcgcgggc

SEQ ID NO: 2444 - DNA, 21 bp, synthetic construct
  source 1..21: mol_type = other DNA
aggccgcctgcctgcgcgggc

SEQ ID NO: 2445 - DNA, 21 bp, synthetic construct
  source 1..21: mol_type = other DNA
aggccgcctgcctgcgcgggc

SEQ ID NO: 2446 - DNA, 21 bp, synthetic construct
  source 1..21: mol_type = other DNA
aggccgcctgcctgcgcgggc

SEQ ID NO: 2447 - DNA, 21 bp, synthetic construct
  source 1..21: mol_type = other DNA
ccgggggccgcgctgcacagg

SEQ ID NO: 2448 - DNA, 21 bp, synthetic construct
  source 1..21: mol_type = other DNA
ccgggggccgcgctgcacagg

SEQ ID NO: 2449 - DNA, 21 bp, synthetic construct
  source 1..21: mol_type = other DNA
ccgggggccgcgctgcacagg

SEQ ID NO: 2450 - DNA, 21 bp, synthetic construct
  source 1..21: mol_type = other DNA
ccgggggccgcgctgcacagg

SEQ ID NO: 2451 - DNA, 21 bp, synthetic construct
  source 1..21: mol_type = other DNA
ccgggggccgcgctgcacagg

SEQ ID NO: 2452 - DNA, 21 bp, synthetic construct
  source 1..21: mol_type = other DNA
ccgggggccgcgctgcacagg

SEQ ID NO: 2453 - DNA, 21 bp, synthetic construct
  source 1..21: mol_type = other DNA
ccgggggccgcgctgcacagg

SEQ ID NO: 2454 - DNA, 21 bp, synthetic construct
  source 1..21: mol_type = other DNA
ccgggggccgcgctgcacagg

SEQ ID NO: 2455 - DNA, 21 bp, synthetic construct
  source 1..21: mol_type = other DNA
cgagggagcagggtgaccccc

SEQ ID NO: 2456 - DNA, 21 bp, synthetic construct
  source 1..21: mol_type = other DNA
cgagggagcagggtgaccccc

SEQ ID NO: 2457 - DNA, 21 bp, synthetic construct
  source 1..21: mol_type = other DNA
cgagggagcagggtgaccccc

SEQ ID NO: 2458 - DNA, 21 bp, synthetic construct
  source 1..21: mol_type = other DNA
cgagggagcagggtgaccccc

SEQ ID NO: 2459 - DNA, 21 bp, synthetic construct
  source 1..21: mol_type = other DNA
cgagggagcagggtgaccccc

SEQ ID NO: 2460 - DNA, 21 bp, synthetic construct
  source 1..21: mol_type = other DNA
cgagggagcagggtgaccccc

SEQ ID NO: 2461 - DNA, 21 bp, synthetic construct
  source 1..21: mol_type = other DNA
cgagggagcagggtgaccccc

SEQ ID NO: 2462 - DNA, 21 bp, synthetic construct
  source 1..21: mol_type = other DNA
cgagggagcagggtgaccccc

SEQ ID NO: 2463 - DNA, 21 bp, synthetic construct
  source 1..21: mol_type = other DNA
tgggcgaaggcgacccacgag

SEQ ID NO: 2464 - DNA, 21 bp, synthetic construct
  source 1..21: mol_type = other DNA
tgggcgaaggcgacccacgag

SEQ ID NO: 2465 - DNA, 21 bp, synthetic construct
  source 1..21: mol_type = other DNA
tgggcgaaggcgacccacgag

SEQ ID NO: 2466 - DNA, 21 bp, synthetic construct
  source 1..21: mol_type = other DNA
tgggcgaaggcgacccacgag

SEQ ID NO: 2467 - DNA, 21 bp, synthetic construct
  source 1..21: mol_type = other DNA
tgggcgaaggcgacccacgag

SEQ ID NO: 2468 - DNA, 21 bp, synthetic construct
  source 1..21: mol_type = other DNA
tgggcgaaggcgacccacgag

SEQ ID NO: 2469 - DNA, 21 bp, synthetic construct
  source 1..21: mol_type = other DNA
tgggcgaaggcgacccacgag

SEQ ID NO: 2470 - DNA, 21 bp, synthetic construct
  source 1..21: mol_type = other DNA
tgggcgaaggcgacccacgag

SEQ ID NO: 2471 - DNA, 21 bp, synthetic construct
  source 1..21: mol_type = other DNA
ccggtgtgggcgaaggcgacc

SEQ ID NO: 2472 - DNA, 21 bp, synthetic construct
  source 1..21: mol_type = other DNA
ccggtgtgggcgaaggcgacc

SEQ ID NO: 2473 - DNA, 21 bp, synthetic construct
  source 1..21: mol_type = other DNA
ccggtgtgggcgaaggcgacc

SEQ ID NO: 2474 - DNA, 21 bp, synthetic construct
  source 1..21: mol_type = other DNA
ccggtgtgggcgaaggcgacc

SEQ ID NO: 2475 - DNA, 21 bp, synthetic construct
  source 1..21: mol_type = other DNA
ccggtgtgggcgaaggcgacc

SEQ ID NO: 2476 - DNA, 21 bp, synthetic construct
  source 1..21: mol_type = other DNA
ccggtgtgggcgaaggcgacc

SEQ ID NO: 2477 - DNA, 21 bp, synthetic construct
  source 1..21: mol_type = other DNA
ccggtgtgggcgaaggcgacc

SEQ ID NO: 2478 - DNA, 21 bp, synthetic construct
  source 1..21: mol_type = other DNA
ccggtgtgggcgaaggcgacc

SEQ ID NO: 2479 - DNA, 21 bp, synthetic construct
  source 1..21: mol_type = other DNA
cgccggtgtgggcgaaggcga

SEQ ID NO: 2480 - DNA, 21 bp, synthetic construct
  source 1..21: mol_type = other DNA
cgccggtgtgggcgaaggcga

SEQ ID NO: 2481 - DNA, 21 bp, synthetic construct
  source 1..21: mol_type = other DNA
cgccggtgtgggcgaaggcga

SEQ ID NO: 2482 - DNA, 21 bp, synthetic construct
  source 1..21: mol_type = other DNA
cgccggtgtgggcgaaggcga

SEQ ID NO: 2483 - DNA, 21 bp, synthetic construct
  source 1..21: mol_type = other DNA
cgccggtgtgggcgaaggcga

SEQ ID NO: 2484 - DNA, 21 bp, synthetic construct
  source 1..21: mol_type = other DNA
cgccggtgtgggcgaaggcga

SEQ ID NO: 2485 - DNA, 21 bp, synthetic construct
  source 1..21: mol_type = other DNA
cgccggtgtgggcgaaggcga

SEQ ID NO: 2486 - DNA, 21 bp, synthetic construct
  source 1..21: mol_type = other DNA
cgccggtgtgggcgaaggcga

SEQ ID NO: 2487 - DNA, 21 bp, synthetic construct
  source 1..21: mol_type = other DNA
agccccgttccccacgcgccg

SEQ ID NO: 2488 - DNA, 21 bp, synthetic construct
  source 1..21: mol_type = other DNA
agccccgttccccacgcgccg

SEQ ID NO: 2489 - DNA, 21 bp, synthetic construct
  source 1..21: mol_type = other DNA
agccccgttccccacgcgccg

SEQ ID NO: 2490 - DNA, 21 bp, synthetic construct
  source 1..21: mol_type = other DNA
agccccgttccccacgcgccg

SEQ ID NO: 2491 - DNA, 21 bp, synthetic construct
  source 1..21: mol_type = other DNA
agccccgttccccacgcgccg

SEQ ID NO: 2492 - DNA, 21 bp, synthetic construct
  source 1..21: mol_type = other DNA
agccccgttccccacgcgccg

SEQ ID NO: 2493 - DNA, 21 bp, synthetic construct
  source 1..21: mol_type = other DNA
agccccgttccccacgcgccg

SEQ ID NO: 2494 - DNA, 21 bp, synthetic construct
  source 1..21: mol_type = other DNA
agccccgttccccacgcgccg

SEQ ID NO: 2495 - DNA, 21 bp, synthetic construct
  source 1..21: mol_type = other DNA
ccgtccggaggagccggggcg

SEQ ID NO: 2496 - DNA, 21 bp, synthetic construct
  source 1..21: mol_type = other DNA
ccgtccggaggagccggggcg

SEQ ID NO: 2497 - DNA, 21 bp, synthetic construct
  source 1..21: mol_type = other DNA
ccgtccggaggagccggggcg

SEQ ID NO: 2498 - DNA, 21 bp, synthetic construct
  source 1..21: mol_type = other DNA
ccgtccggaggagccggggcg

SEQ ID NO: 2499 - DNA, 21 bp, synthetic construct
  source 1..21: mol_type = other DNA
ccgtccggaggagccggggcg

SEQ ID NO: 2500 - DNA, 21 bp, synthetic construct
  source 1..21: mol_type = other DNA
ccgtccggaggagccggggcg

SEQ ID NO: 2501 - DNA, 21 bp, synthetic construct
  source 1..21: mol_type = other DNA
ccgtccggaggagccggggcg

SEQ ID NO: 2502 - DNA, 21 bp, synthetic construct
  source 1..21: mol_type = other DNA
ccgtccggaggagccggggcg

SEQ ID NO: 2503 - DNA, 21 bp, synthetic construct
  source 1..21: mol_type = other DNA
agagcgccccgtccggaggag

SEQ ID NO: 2504 - DNA, 21 bp, synthetic construct
  source 1..21: mol_type = other DNA
agagcgccccgtccggaggag

SEQ ID NO: 2505 - DNA, 21 bp, synthetic construct
  source 1..21: mol_type = other DNA
agagcgccccgtccggaggag

SEQ ID NO: 2506 - DNA, 21 bp, synthetic construct
  source 1..21: mol_type = other DNA
agagcgccccgtccggaggag

SEQ ID NO: 2507 - DNA, 21 bp, synthetic construct
  source 1..21: mol_type = other DNA
agagcgccccgtccggaggag

SEQ ID NO: 2508 - DNA, 21 bp, synthetic construct
  source 1..21: mol_type = other DNA
agagcgccccgtccggaggag

SEQ ID NO: 2509 - DNA, 21 bp, synthetic construct
  source 1..21: mol_type = other DNA
agagcgccccgtccggaggag

SEQ ID NO: 2510 - DNA, 21 bp, synthetic construct
  source 1..21: mol_type = other DNA
agagcgccccgtccggaggag

SEQ ID NO: 2511 - DNA, 21 bp, synthetic construct
  source 1..21: mol_type = other DNA
ccgggggcgcgggctggggag

SEQ ID NO: 2512 - DNA, 21 bp, synthetic construct
  source 1..21: mol_type = other DNA
ccgggggcgcgggctggggag

SEQ ID NO: 2513 - DNA, 21 bp, synthetic construct
  source 1..21: mol_type = other DNA
ccgggggcgcgggctggggag

SEQ ID NO: 2514 - DNA, 21 bp, synthetic construct
  source 1..21: mol_type = other DNA
ccgggggcgcgggctggggag

SEQ ID NO: 2515 - DNA, 21 bp, synthetic construct
  source 1..21: mol_type = other DNA
ccgggggcgcgggctggggag

SEQ ID NO: 2516 - DNA, 21 bp, synthetic construct
  source 1..21: mol_type = other DNA
ccgggggcgcgggctggggag

SEQ ID NO: 2517 - DNA, 21 bp, synthetic construct
  source 1..21: mol_type = other DNA
ccgggggcgcgggctggggag

SEQ ID NO: 2518 - DNA, 21 bp, synthetic construct
  source 1..21: mol_type = other DNA
ccgggggcgcgggctggggag

SEQ ID NO: 2519 - DNA, 21 bp, synthetic construct
  source 1..21: mol_type = other DNA
ggcggaggcgtccgggggcgc

SEQ ID NO: 2520 - DNA, 21 bp, synthetic construct
  source 1..21: mol_type = other DNA
ggcggaggcgtccgggggcgc

SEQ ID NO: 2521 - DNA, 21 bp, synthetic construct
  source 1..21: mol_type = other DNA
ggcggaggcgtccgggggcgc

SEQ ID NO: 2522 - DNA, 21 bp, synthetic construct
  source 1..21: mol_type = other DNA
ggcggaggcgtccgggggcgc

SEQ ID NO: 2523 - DNA, 21 bp, synthetic construct
  source 1..21: mol_type = other DNA
ggcggaggcgtccgggggcgc

SEQ ID NO: 2524 - DNA, 21 bp, synthetic construct
  source 1..21: mol_type = other DNA
ggcggaggcgtccgggggcgc

SEQ ID NO: 2525 - DNA, 21 bp, synthetic construct
  source 1..21: mol_type = other DNA
ggcggaggcgtccgggggcgc

SEQ ID NO: 2526 - DNA, 21 bp, synthetic construct
  source 1..21: mol_type = other DNA
ggcggaggcgtccgggggcgc

SEQ ID NO: 2527 - DNA, 21 bp, synthetic construct
  source 1..21: mol_type = other DNA
agaccccgcgtcctaaagctc

SEQ ID NO: 2528 - DNA, 21 bp, synthetic construct
  source 1..21: mol_type = other DNA
agaccccgcgtcctaaagctc

SEQ ID NO: 2529 - DNA, 21 bp, synthetic construct
  source 1..21: mol_type = other DNA
agaccccgcgtcctaaagctc

SEQ ID NO: 2530 - DNA, 21 bp, synthetic construct
  source 1..21: mol_type = other DNA
agaccccgcgtcctaaagctc

SEQ ID NO: 2531 - DNA, 21 bp, synthetic construct
  source 1..21: mol_type = other DNA
agaccccgcgtcctaaagctc

SEQ ID NO: 2532 - DNA, 21 bp, synthetic construct
  source 1..21: mol_type = other DNA
agaccccgcgtcctaaagctc

SEQ ID NO: 2533 - DNA, 21 bp, synthetic construct
  source 1..21: mol_type = other DNA
agaccccgcgtcctaaagctc

SEQ ID NO: 2534 - DNA, 21 bp, synthetic construct
  source 1..21: mol_type = other DNA
agaccccgcgtcctaaagctc

SEQ ID NO: 2535 - DNA, 21 bp, synthetic construct
  source 1..21: mol_type = other DNA
gggcctagaccccgcgtccta

SEQ ID NO: 2536 - DNA, 21 bp, synthetic construct
  source 1..21: mol_type = other DNA
gggcctagaccccgcgtccta

SEQ ID NO: 2537 - DNA, 21 bp, synthetic construct
  source 1..21: mol_type = other DNA
gggcctagaccccgcgtccta

SEQ ID NO: 2538 - DNA, 21 bp, synthetic construct
  source 1..21: mol_type = other DNA
gggcctagaccccgcgtccta

SEQ ID NO: 2539 - DNA, 21 bp, synthetic construct
  source 1..21: mol_type = other DNA
gggcctagaccccgcgtccta

SEQ ID NO: 2540 - DNA, 21 bp, synthetic construct
  source 1..21: mol_type = other DNA
gggcctagaccccgcgtccta

SEQ ID NO: 2541 - DNA, 21 bp, synthetic construct
  source 1..21: mol_type = other DNA
gggcctagaccccgcgtccta

SEQ ID NO: 2542 - DNA, 21 bp, synthetic construct
  source 1..21: mol_type = other DNA
gggcctagaccccgcgtccta

SEQ ID NO: 2543 - DNA, 21 bp, synthetic construct
  source 1..21: mol_type = other DNA
tggctcacgaaagccccctgt

SEQ ID NO: 2544 - DNA, 21 bp, synthetic construct
  source 1..21: mol_type = other DNA
tggctcacgaaagccccctgt

SEQ ID NO: 2545 - DNA, 21 bp, synthetic construct
  source 1..21: mol_type = other DNA
tggctcacgaaagccccctgt

SEQ ID NO: 2546 - DNA, 21 bp, synthetic construct
  source 1..21: mol_type = other DNA
tggctcacgaaagccccctgt

SEQ ID NO: 2547 - DNA, 21 bp, synthetic construct
  source 1..21: mol_type = other DNA
tggctcacgaaagccccctgt

SEQ ID NO: 2548 - DNA, 21 bp, synthetic construct
  source 1..21: mol_type = other DNA
tggctcacgaaagccccctgt

SEQ ID NO: 2549 - DNA, 21 bp, synthetic construct
  source 1..21: mol_type = other DNA
tggctcacgaaagccccctgt

SEQ ID NO: 2550 - DNA, 21 bp, synthetic construct
  source 1..21: mol_type = other DNA
tggctcacgaaagccccctgt

SEQ ID NO: 2551 - DNA, 21 bp, synthetic construct
  source 1..21: mol_type = other DNA
tgcctggctcacgaaagcccc

SEQ ID NO: 2552 - DNA, 21 bp, synthetic construct
  source 1..21: mol_type = other DNA
tgcctggctcacgaaagcccc

SEQ ID NO: 2553 - DNA, 21 bp, synthetic construct
  source 1..21: mol_type = other DNA
tgcctggctcacgaaagcccc

SEQ ID NO: 2554 - DNA, 21 bp, synthetic construct
  source 1..21: mol_type = other DNA
tgcctggctcacgaaagcccc

SEQ ID NO: 2555 - DNA, 21 bp, synthetic construct
  source 1..21: mol_type = other DNA
tgcctggctcacgaaagcccc

SEQ ID NO: 2556 - DNA, 21 bp, synthetic construct
  source 1..21: mol_type = other DNA
tgcctggctcacgaaagcccc

SEQ ID NO: 2557 - DNA, 21 bp, synthetic construct
  source 1..21: mol_type = other DNA
tgcctggctcacgaaagcccc

SEQ ID NO: 2558 - DNA, 21 bp, synthetic construct
  source 1..21: mol_type = other DNA
tgcctggctcacgaaagcccc

SEQ ID NO: 2559 - DNA, 21 bp, synthetic construct
  source 1..21: mol_type = other DNA
tcgctgcctggctcacgaaag

SEQ ID NO: 2560 - DNA, 21 bp, synthetic construct
  source 1..21: mol_type = other DNA
tcgctgcctggctcacgaaag

SEQ ID NO: 2561 - DNA, 21 bp, synthetic construct
  source 1..21: mol_type = other DNA
tcgctgcctggctcacgaaag

SEQ ID NO: 2562 - DNA, 21 bp, synthetic construct
  source 1..21: mol_type = other DNA
tcgctgcctggctcacgaaag

SEQ ID NO: 2563 - DNA, 21 bp, synthetic construct
  source 1..21: mol_type = other DNA
tcgctgcctggctcacgaaag

SEQ ID NO: 2564 - DNA, 21 bp, synthetic construct
  source 1..21: mol_type = other DNA
tcgctgcctggctcacgaaag

SEQ ID NO: 2565 - DNA, 21 bp, synthetic construct
  source 1..21: mol_type = other DNA
tcgctgcctggctcacgaaag

SEQ ID NO: 2566 - DNA, 21 bp, synthetic construct
  source 1..21: mol_type = other DNA
tcgctgcctggctcacgaaag

SEQ ID NO: 2567 - DNA, 21 bp, synthetic construct
  source 1..21: mol_type = other DNA
tgggctgcagcgcgggggcgg

SEQ ID NO: 2568 - DNA, 21 bp, synthetic construct
  source 1..21: mol_type = other DNA
tgggctgcagcgcgggggcgg

SEQ ID NO: 2569 - DNA, 21 bp, synthetic construct
  source 1..21: mol_type = other DNA
tgggctgcagcgcgggggcgg

SEQ ID NO: 2570 - DNA, 21 bp, synthetic construct
  source 1..21: mol_type = other DNA
tgggctgcagcgcgggggcgg

SEQ ID NO: 2571 - DNA, 21 bp, synthetic construct
  source 1..21: mol_type = other DNA
tgggctgcagcgcgggggcgg

SEQ ID NO: 2572 - DNA, 21 bp, synthetic construct
  source 1..21: mol_type = other DNA
tgggctgcagcgcgggggcgg

SEQ ID NO: 2573 - DNA, 21 bp, synthetic construct
  source 1..21: mol_type = other DNA
tgggctgcagcgcgggggcgg

SEQ ID NO: 2574 - DNA, 21 bp, synthetic construct
  source 1..21: mol_type = other DNA
tgggctgcagcgcgggggcgg

SEQ ID NO: 2575 - DNA, 21 bp, synthetic construct
  source 1..21: mol_type = other DNA
cgccggggcaggttgggagat

SEQ ID NO: 2576 - DNA, 21 bp, synthetic construct
  source 1..21: mol_type = other DNA
cgccggggcaggttgggagat

SEQ ID NO: 2577 - DNA, 21 bp, synthetic construct
  source 1..21: mol_type = other DNA
cgccggggcaggttgggagat

SEQ ID NO: 2578 - DNA, 21 bp, synthetic construct
  source 1..21: mol_type = other DNA
cgccggggcaggttgggagat

SEQ ID NO: 2579 - DNA, 21 bp, synthetic construct
  source 1..21: mol_type = other DNA
cgccggggcaggttgggagat

SEQ ID NO: 2580 - DNA, 21 bp, synthetic construct
  source 1..21: mol_type = other DNA
cgccggggcaggttgggagat

SEQ ID NO: 2581 - DNA, 21 bp, synthetic construct
  source 1..21: mol_type = other DNA
cgccggggcaggttgggagat

SEQ ID NO: 2582 - DNA, 21 bp, synthetic construct
  source 1..21: mol_type = other DNA
cgccggggcaggttgggagat

SEQ ID NO: 2583 - DNA, 21 bp, synthetic construct
  source 1..21: mol_type = other DNA
aatccccgcgcgccggggcag

SEQ ID NO: 2584 - DNA, 21 bp, synthetic construct
  source 1..21: mol_type = other DNA
aatccccgcgcgccggggcag

SEQ ID NO: 2585 - DNA, 21 bp, synthetic construct
  source 1..21: mol_type = other DNA
aatccccgcgcgccggggcag

SEQ ID NO: 2586 - DNA, 21 bp, synthetic construct
  source 1..21: mol_type = other DNA
aatccccgcgcgccggggcag

SEQ ID NO: 2587 - DNA, 21 bp, synthetic construct
  source 1..21: mol_type = other DNA
aatccccgcgcgccggggcag

SEQ ID NO: 2588 - DNA, 21 bp, synthetic construct
  source 1..21: mol_type = other DNA
aatccccgcgcgccggggcag

SEQ ID NO: 2589 - DNA, 21 bp, synthetic construct
  source 1..21: mol_type = other DNA
aatccccgcgcgccggggcag

SEQ ID NO: 2590 - DNA, 21 bp, synthetic construct
  source 1..21: mol_type = other DNA
aatccccgcgcgccggggcag

SEQ ID NO: 2591 - DNA, 21 bp, synthetic construct
  source 1..21: mol_type = other DNA
ggcggcgtaggcgaaatcccc

SEQ ID NO: 2592 - DNA, 21 bp, synthetic construct
  source 1..21: mol_type = other DNA
ggcggcgtaggcgaaatcccc

SEQ ID NO: 2593 - DNA, 21 bp, synthetic construct
  source 1..21: mol_type = other DNA
ggcggcgtaggcgaaatcccc

SEQ ID NO: 2594 - DNA, 21 bp, synthetic construct
  source 1..21: mol_type = other DNA
ggcggcgtaggcgaaatcccc

SEQ ID NO: 2595 - DNA, 21 bp, synthetic construct
  source 1..21: mol_type = other DNA
ggcggcgtaggcgaaatcccc

SEQ ID NO: 2596 - DNA, 21 bp, synthetic construct
  source 1..21: mol_type = other DNA
ggcggcgtaggcgaaatcccc

SEQ ID NO: 2597 - DNA, 21 bp, synthetic construct
  source 1..21: mol_type = other DNA
ggcggcgtaggcgaaatcccc

SEQ ID NO: 2598 - DNA, 21 bp, synthetic construct
  source 1..21: mol_type = other DNA
ggcggcgtaggcgaaatcccc

SEQ ID NO: 2599 - DNA, 21 bp, synthetic construct
  source 1..21: mol_type = other DNA
gtccggaggagccggggcggc

SEQ ID NO: 2600 - DNA, 21 bp, synthetic construct
  source 1..21: mol_type = other DNA
gtccggaggagccggggcggc

SEQ ID NO: 2601 - DNA, 21 bp, synthetic construct
  source 1..21: mol_type = other DNA
gtccggaggagccggggcggc

SEQ ID NO: 2602 - DNA, 21 bp, synthetic construct
  source 1..21: mol_type = other DNA
gtccggaggagccggggcggc

SEQ ID NO: 2603 - DNA, 21 bp, synthetic construct
  source 1..21: mol_type = other DNA
gtccggaggagccggggcggc

SEQ ID NO: 2604 - DNA, 21 bp, synthetic construct
  source 1..21: mol_type = other DNA
gtccggaggagccggggcggc

SEQ ID NO: 2605 - DNA, 21 bp, synthetic construct
  source 1..21: mol_type = other DNA
gtccggaggagccggggcggc

SEQ ID NO: 2606 - DNA, 21 bp, synthetic construct
  source 1..21: mol_type = other DNA
gtccggaggagccggggcggc

SEQ ID NO: 2607 - DNA, 21 bp, synthetic construct
  source 1..21: mol_type = other DNA
cctgagggtgggagagcgccc

SEQ ID NO: 2608 - DNA, 21 bp, synthetic construct
  source 1..21: mol_type = other DNA
cctgagggtgggagagcgccc

SEQ ID NO: 2609 - DNA, 21 bp, synthetic construct
  source 1..21: mol_type = other DNA
cctgagggtgggagagcgccc

SEQ ID NO: 2610 - DNA, 21 bp, synthetic construct
  source 1..21: mol_type = other DNA
cctgagggtgggagagcgccc

SEQ ID NO: 2611 - DNA, 21 bp, synthetic construct
  source 1..21: mol_type = other DNA
cctgagggtgggagagcgccc

SEQ ID NO: 2612 - DNA, 21 bp, synthetic construct
  source 1..21: mol_type = other DNA
cctgagggtgggagagcgccc

SEQ ID NO: 2613 - DNA, 21 bp, synthetic construct
  source 1..21: mol_type = other DNA
cctgagggtgggagagcgccc

SEQ ID NO: 2614 - DNA, 21 bp, synthetic construct
  source 1..21: mol_type = other DNA
cctgagggtgggagagcgccc

SEQ ID NO: 2615 - DNA, 21 bp, synthetic construct
  source 1..21: mol_type = other DNA
gcctgagggtgggagagcgcc

SEQ ID NO: 2616 - DNA, 21 bp, synthetic construct
  source 1..21: mol_type = other DNA
gcctgagggtgggagagcgcc

SEQ ID NO: 2617 - DNA, 21 bp, synthetic construct
  source 1..21: mol_type = other DNA
gcctgagggtgggagagcgcc

SEQ ID NO: 2618 - DNA, 21 bp, synthetic construct
  source 1..21: mol_type = other DNA
gcctgagggtgggagagcgcc

SEQ ID NO: 2619 - DNA, 21 bp, synthetic construct
  source 1..21: mol_type = other DNA
gcctgagggtgggagagcgcc

SEQ ID NO: 2620 - DNA, 21 bp, synthetic construct
  source 1..21: mol_type = other DNA
gcctgagggtgggagagcgcc

SEQ ID NO: 2621 - DNA, 21 bp, synthetic construct
  source 1..21: mol_type = other DNA
gcctgagggtgggagagcgcc

SEQ ID NO: 2622 - DNA, 21 bp, synthetic construct
  source 1..21: mol_type = other DNA
gcctgagggtgggagagcgcc

SEQ ID NO: 2623 - DNA, 21 bp, synthetic construct
  source 1..21: mol_type = other DNA
aggccaccgaggagcctgagg

SEQ ID NO: 2624 - DNA, 21 bp, synthetic construct
  source 1..21: mol_type = other DNA
aggccaccgaggagcctgagg

SEQ ID NO: 2625 - DNA, 21 bp, synthetic construct
  source 1..21: mol_type = other DNA
aggccaccgaggagcctgagg

SEQ ID NO: 2626 - DNA, 21 bp, synthetic construct
  source 1..21: mol_type = other DNA
aggccaccgaggagcctgagg

SEQ ID NO: 2627 - DNA, 21 bp, synthetic construct
  source 1..21: mol_type = other DNA
aggccaccgaggagcctgagg

SEQ ID NO: 2628 - DNA, 21 bp, synthetic construct
  source 1..21: mol_type = other DNA
aggccaccgaggagcctgagg

SEQ ID NO: 2629 - DNA, 21 bp, synthetic construct
  source 1..21: mol_type = other DNA
aggccaccgaggagcctgagg

SEQ ID NO: 2630 - DNA, 21 bp, synthetic construct
  source 1..21: mol_type = other DNA
aggccaccgaggagcctgagg

SEQ ID NO: 2631 - DNA, 21 bp, synthetic construct
  source 1..21: mol_type = other DNA
cctgcggccccgcttgagcgg

SEQ ID NO: 2632 - DNA, 21 bp, synthetic construct
  source 1..21: mol_type = other DNA
cctgcggccccgcttgagcgg

SEQ ID NO: 2633 - DNA, 21 bp, synthetic construct
  source 1..21: mol_type = other DNA
cctgcggccccgcttgagcgg

SEQ ID NO: 2634 - DNA, 21 bp, synthetic construct
  source 1..21: mol_type = other DNA
cctgcggccccgcttgagcgg

SEQ ID NO: 2635 - DNA, 21 bp, synthetic construct
  source 1..21: mol_type = other DNA
cctgcggccccgcttgagcgg

SEQ ID NO: 2636 - DNA, 21 bp, synthetic construct
  source 1..21: mol_type = other DNA
cctgcggccccgcttgagcgg

SEQ ID NO: 2637 - DNA, 21 bp, synthetic construct
  source 1..21: mol_type = other DNA
cctgcggccccgcttgagcgg

SEQ ID NO: 2638 - DNA, 21 bp, synthetic construct
  source 1..21: mol_type = other DNA
cctgcggccccgcttgagcgg

SEQ ID NO: 2639 - DNA, 21 bp, synthetic construct
  source 1..21: mol_type = other DNA
gagctgccccggcttggggtt

SEQ ID NO: 2640 - DNA, 21 bp, synthetic construct
  source 1..21: mol_type = other DNA
gagctgccccggcttggggtt

SEQ ID NO: 2641 - DNA, 21 bp, synthetic construct
  source 1..21: mol_type = other DNA
gagctgccccggcttggggtt

SEQ ID NO: 2642 - DNA, 21 bp, synthetic construct
  source 1..21: mol_type = other DNA
gagctgccccggcttggggtt

SEQ ID NO: 2643 - DNA, 21 bp, synthetic construct
  source 1..21: mol_type = other DNA
gagctgccccggcttggggtt

SEQ ID NO: 2644 - DNA, 21 bp, synthetic construct
  source 1..21: mol_type = other DNA
gagctgccccggcttggggtt

SEQ ID NO: 2645 - DNA, 21 bp, synthetic construct
  source 1..21: mol_type = other DNA
gagctgccccggcttggggtt

SEQ ID NO: 2646 - DNA, 21 bp, synthetic construct
  source 1..21: mol_type = other DNA
gagctgccccggcttggggtt

SEQ ID NO: 2647 - DNA, 21 bp, synthetic construct
  source 1..21: mol_type = other DNA
cctgccgcgcggaggcggagg

SEQ ID NO: 2648 - DNA, 21 bp, synthetic construct
  source 1..21: mol_type = other DNA
cctgccgcgcggaggcggagg

SEQ ID NO: 2649 - DNA, 21 bp, synthetic construct
  source 1..21: mol_type = other DNA
cctgccgcgcggaggcggagg

SEQ ID NO: 2650 - DNA, 21 bp, synthetic construct
  source 1..21: mol_type = other DNA
cctgccgcgcggaggcggagg

SEQ ID NO: 2651 - DNA, 21 bp, synthetic construct
  source 1..21: mol_type = other DNA
cctgccgcgcggaggcggagg

SEQ ID NO: 2652 - DNA, 21 bp, synthetic construct
  source 1..21: mol_type = other DNA
cctgccgcgcggaggcggagg

SEQ ID NO: 2653 - DNA, 21 bp, synthetic construct
  source 1..21: mol_type = other DNA
cctgccgcgcggaggcggagg

SEQ ID NO: 2654 - DNA, 21 bp, synthetic construct
  source 1..21: mol_type = other DNA
cctgccgcgcggaggcggagg

SEQ ID NO: 2655 - DNA, 21 bp, synthetic construct
  source 1..21: mol_type = other DNA
ccctgccgcgcggaggcggag

SEQ ID NO: 2656 - DNA, 21 bp, synthetic construct
  source 1..21: mol_type = other DNA
ccctgccgcgcggaggcggag

SEQ ID NO: 2657 - DNA, 21 bp, synthetic construct
  source 1..21: mol_type = other DNA
ccctgccgcgcggaggcggag

SEQ ID NO: 2658 - DNA, 21 bp, synthetic construct
  source 1..21: mol_type = other DNA
ccctgccgcgcggaggcggag

SEQ ID NO: 2659 - DNA, 21 bp, synthetic construct
  source 1..21: mol_type = other DNA
ccctgccgcgcggaggcggag

SEQ ID NO: 2660 - DNA, 21 bp, synthetic construct
  source 1..21: mol_type = other DNA
ccctgccgcgcggaggcggag

SEQ ID NO: 2661 - DNA, 21 bp, synthetic construct
  source 1..21: mol_type = other DNA
ccctgccgcgcggaggcggag

SEQ ID NO: 2662 - DNA, 21 bp, synthetic construct
  source 1..21: mol_type = other DNA
ccctgccgcgcggaggcggag

SEQ ID NO: 2663 - DNA, 21 bp, synthetic construct
  source 1..21: mol_type = other DNA
atctgcccctgccgcgcggag

SEQ ID NO: 2664 - DNA, 21 bp, synthetic construct
  source 1..21: mol_type = other DNA
atctgcccctgccgcgcggag

SEQ ID NO: 2665 - DNA, 21 bp, synthetic construct
  source 1..21: mol_type = other DNA
atctgcccctgccgcgcggag

SEQ ID NO: 2666 - DNA, 21 bp, synthetic construct
  source 1..21: mol_type = other DNA
atctgcccctgccgcgcggag

SEQ ID NO: 2667 - DNA, 21 bp, synthetic construct
  source 1..21: mol_type = other DNA
atctgcccctgccgcgcggag

SEQ ID NO: 2668 - DNA, 21 bp, synthetic construct
  source 1..21: mol_type = other DNA
atctgcccctgccgcgcggag

SEQ ID NO: 2669 - DNA, 21 bp, synthetic construct
  source 1..21: mol_type = other DNA
atctgcccctgccgcgcggag

SEQ ID NO: 2670 - DNA, 21 bp, synthetic construct
  source 1..21: mol_type = other DNA
atctgcccctgccgcgcggag

SEQ ID NO: 2671 - DNA, 21 bp, synthetic construct
  source 1..21: mol_type = other DNA
cttgcatctgcccctgccgcg

SEQ ID NO: 2672 - DNA, 21 bp, synthetic construct
  source 1..21: mol_type = other DNA
cttgcatctgcccctgccgcg

SEQ ID NO: 2673 - DNA, 21 bp, synthetic construct
  source 1..21: mol_type = other DNA
cttgcatctgcccctgccgcg

SEQ ID NO: 2674 - DNA, 21 bp, synthetic construct
  source 1..21: mol_type = other DNA
cttgcatctgcccctgccgcg

SEQ ID NO: 2675 - DNA, 21 bp, synthetic construct
  source 1..21: mol_type = other DNA
cttgcatctgcccctgccgcg

SEQ ID NO: 2676 - DNA, 21 bp, synthetic construct
  source 1..21: mol_type = other DNA
cttgcatctgcccctgccgcg

SEQ ID NO: 2677 - DNA, 21 bp, synthetic construct
  source 1..21: mol_type = other DNA
cttgcatctgcccctgccgcg

SEQ ID NO: 2678 - DNA, 21 bp, synthetic construct
  source 1..21: mol_type = other DNA
cttgcatctgcccctgccgcg

SEQ ID NO: 2679 - DNA, 21 bp, synthetic construct
  source 1..21: mol_type = other DNA
agcgcctgggagggcgccggg

SEQ ID NO: 2680 - DNA, 21 bp, synthetic construct
  source 1..21: mol_type = other DNA
agcgcctgggagggcgccggg

SEQ ID NO: 2681 - DNA, 21 bp, synthetic construct
  source 1..21: mol_type = other DNA
agcgcctgggagggcgccggg

SEQ ID NO: 2682 - DNA, 21 bp, synthetic construct
  source 1..21: mol_type = other DNA
agcgcctgggagggcgccggg

SEQ ID NO: 2683 - DNA, 21 bp, synthetic construct
  source 1..21: mol_type = other DNA
agcgcctgggagggcgccggg

SEQ ID NO: 2684 - DNA, 21 bp, synthetic construct
  source 1..21: mol_type = other DNA
agcgcctgggagggcgccggg

SEQ ID NO: 2685 - DNA, 21 bp, synthetic construct
  source 1..21: mol_type = other DNA
agcgcctgggagggcgccggg

SEQ ID NO: 2686 - DNA, 21 bp, synthetic construct
  source 1..21: mol_type = other DNA
agcgcctgggagggcgccggg

SEQ ID NO: 2687 - DNA, 21 bp, synthetic construct
  source 1..21: mol_type = other DNA
cagaccagggcgccggctcct

SEQ ID NO: 2688 - DNA, 21 bp, synthetic construct
  source 1..21: mol_type = other DNA
cagaccagggcgccggctcct

SEQ ID NO: 2689 - DNA, 21 bp, synthetic construct
  source 1..21: mol_type = other DNA
cagaccagggcgccggctcct

SEQ ID NO: 2690 - DNA, 21 bp, synthetic construct
  source 1..21: mol_type = other DNA
cagaccagggcgccggctcct

SEQ ID NO: 2691 - DNA, 21 bp, synthetic construct
  source 1..21: mol_type = other DNA
cagaccagggcgccggctcct

SEQ ID NO: 2692 - DNA, 21 bp, synthetic construct
  source 1..21: mol_type = other DNA
cagaccagggcgccggctcct

SEQ ID NO: 2693 - DNA, 21 bp, synthetic construct
  source 1..21: mol_type = other DNA
cagaccagggcgccggctcct

SEQ ID NO: 2694 - DNA, 21 bp, synthetic construct
  source 1..21: mol_type = other DNA
cagaccagggcgccggctcct

SEQ ID NO: 2695 - DNA, 21 bp, synthetic construct
  source 1..21: mol_type = other DNA
tccgggctcgccaggagctca

SEQ ID NO: 2696 - DNA, 21 bp, synthetic construct
  source 1..21: mol_type = other DNA
tccgggctcgccaggagctca

SEQ ID NO: 2697 - DNA, 21 bp, synthetic construct
  source 1..21: mol_type = other DNA
tccgggctcgccaggagctca

SEQ ID NO: 2698 - DNA, 21 bp, synthetic construct
  source 1..21: mol_type = other DNA
tccgggctcgccaggagctca

SEQ ID NO: 2699 - DNA, 21 bp, synthetic construct
  source 1..21: mol_type = other DNA
tccgggctcgccaggagctca

SEQ ID NO: 2700 - DNA, 21 bp, synthetic construct
  source 1..21: mol_type = other DNA
tccgggctcgccaggagctca

SEQ ID NO: 2701 - DNA, 21 bp, synthetic construct
  source 1..21: mol_type = other DNA
tccgggctcgccaggagctca

SEQ ID NO: 2702 - DNA, 21 bp, synthetic construct
  source 1..21: mol_type = other DNA
tccgggctcgccaggagctca

SEQ ID NO: 2703 - DNA, 21 bp, synthetic construct
  source 1..21: mol_type = other DNA
cagaaactccgggctcgccag

SEQ ID NO: 2704 - DNA, 21 bp, synthetic construct
  source 1..21: mol_type = other DNA
cagaaactccgggctcgccag

SEQ ID NO: 2705 - DNA, 21 bp, synthetic construct
  source 1..21: mol_type = other DNA
cagaaactccgggctcgccag

SEQ ID NO: 2706 - DNA, 21 bp, synthetic construct
  source 1..21: mol_type = other DNA
cagaaactccgggctcgccag

SEQ ID NO: 2707 - DNA, 21 bp, synthetic construct
  source 1..21: mol_type = other DNA
cagaaactccgggctcgccag

SEQ ID NO: 2708 - DNA, 21 bp, synthetic construct
  source 1..21: mol_type = other DNA
cagaaactccgggctcgccag

SEQ ID NO: 2709 - DNA, 21 bp, synthetic construct
  source 1..21: mol_type = other DNA
cagaaactccgggctcgccag

SEQ ID NO: 2710 - DNA, 21 bp, synthetic construct
  source 1..21: mol_type = other DNA
cagaaactccgggctcgccag

SEQ ID NO: 2711 - DNA, 21 bp, synthetic construct
  source 1..21: mol_type = other DNA
gttgcgcctgctgcagaaact

SEQ ID NO: 2712 - DNA, 21 bp, synthetic construct
  source 1..21: mol_type = other DNA
gttgcgcctgctgcagaaact

SEQ ID NO: 2713 - DNA, 21 bp, synthetic construct
  source 1..21: mol_type = other DNA
gttgcgcctgctgcagaaact

SEQ ID NO: 2714 - DNA, 21 bp, synthetic construct
  source 1..21: mol_type = other DNA
gttgcgcctgctgcagaaact

SEQ ID NO: 2715 - DNA, 21 bp, synthetic construct
  source 1..21: mol_type = other DNA
gttgcgcctgctgcagaaact

SEQ ID NO: 2716 - DNA, 21 bp, synthetic construct
  source 1..21: mol_type = other DNA
gttgcgcctgctgcagaaact

SEQ ID NO: 2717 - DNA, 21 bp, synthetic construct
  source 1..21: mol_type = other DNA
gttgcgcctgctgcagaaact

SEQ ID NO: 2718 - DNA, 21 bp, synthetic construct
  source 1..21: mol_type = other DNA
gttgcgcctgctgcagaaact

SEQ ID NO: 2719 - DNA, 21 bp, synthetic construct
  source 1..21: mol_type = other DNA
tttctaggagaggttgcgcct

SEQ ID NO: 2720 - DNA, 21 bp, synthetic construct
  source 1..21: mol_type = other DNA
tttctaggagaggttgcgcct

SEQ ID NO: 2721 - DNA, 21 bp, synthetic construct
  source 1..21: mol_type = other DNA
tttctaggagaggttgcgcct

SEQ ID NO: 2722 - DNA, 21 bp, synthetic construct
  source 1..21: mol_type = other DNA
tttctaggagaggttgcgcct

SEQ ID NO: 2723 - DNA, 21 bp, synthetic construct
  source 1..21: mol_type = other DNA
tttctaggagaggttgcgcct

SEQ ID NO: 2724 - DNA, 21 bp, synthetic construct
  source 1..21: mol_type = other DNA
tttctaggagaggttgcgcct

SEQ ID NO: 2725 - DNA, 21 bp, synthetic construct
  source 1..21: mol_type = other DNA
tttctaggagaggttgcgcct

SEQ ID NO: 2726 - DNA, 21 bp, synthetic construct
  source 1..21: mol_type = other DNA
tttctaggagaggttgcgcct

SEQ ID NO: 2727 - DNA, 21 bp, synthetic construct
  source 1..21: mol_type = other DNA
gcctccgtttctaggagaggt

SEQ ID NO: 2728 - DNA, 21 bp, synthetic construct
  source 1..21: mol_type = other DNA
gcctccgtttctaggagaggt

SEQ ID NO: 2729 - DNA, 21 bp, synthetic construct
  source 1..21: mol_type = other DNA
gcctccgtttctaggagaggt

SEQ ID NO: 2730 - DNA, 21 bp, synthetic construct
  source 1..21: mol_type = other DNA
gcctccgtttctaggagaggt

SEQ ID NO: 2731 - DNA, 21 bp, synthetic construct
  source 1..21: mol_type = other DNA
gcctccgtttctaggagaggt

SEQ ID NO: 2732 - DNA, 21 bp, synthetic construct
  source 1..21: mol_type = other DNA
gcctccgtttctaggagaggt

SEQ ID NO: 2733 - DNA, 21 bp, synthetic construct
  source 1..21: mol_type = other DNA
gcctccgtttctaggagaggt

SEQ ID NO: 2734 - DNA, 21 bp, synthetic construct
  source 1..21: mol_type = other DNA
gcctccgtttctaggagaggt

SEQ ID NO: 2735 - DNA, 21 bp, synthetic construct
  source 1..21: mol_type = other DNA
ccccggggcctccgtttctag

SEQ ID NO: 2736 - DNA, 21 bp, synthetic construct
  source 1..21: mol_type = other DNA
ccccggggcctccgtttctag

SEQ ID NO: 2737 - DNA, 21 bp, synthetic construct
  source 1..21: mol_type = other DNA
ccccggggcctccgtttctag

SEQ ID NO: 2738 - DNA, 21 bp, synthetic construct
  source 1..21: mol_type = other DNA
ccccggggcctccgtttctag

SEQ ID NO: 2739 - DNA, 21 bp, synthetic construct
  source 1..21: mol_type = other DNA
ccccggggcctccgtttctag

SEQ ID NO: 2740 - DNA, 21 bp, synthetic construct
  source 1..21: mol_type = other DNA
ccccggggcctccgtttctag

SEQ ID NO: 2741 - DNA, 21 bp, synthetic construct
  source 1..21: mol_type = other DNA
ccccggggcctccgtttctag

SEQ ID NO: 2742 - DNA, 21 bp, synthetic construct
  source 1..21: mol_type = other DNA
ccccggggcctccgtttctag

SEQ ID NO: 2743 - DNA, 21 bp, synthetic construct
  source 1..21: mol_type = other DNA
tccgtcgccgtcctcgtcccc

SEQ ID NO: 2744 - DNA, 21 bp, synthetic construct
  source 1..21: mol_type = other DNA
tccgtcgccgtcctcgtcccc

SEQ ID NO: 2745 - DNA, 21 bp, synthetic construct
  source 1..21: mol_type = other DNA
tccgtcgccgtcctcgtcccc

SEQ ID NO: 2746 - DNA, 21 bp, synthetic construct
  source 1..21: mol_type = other DNA
tccgtcgccgtcctcgtcccc

SEQ ID NO: 2747 - DNA, 21 bp, synthetic construct
  source 1..21: mol_type = other DNA
tccgtcgccgtcctcgtcccc

SEQ ID NO: 2748 - DNA, 21 bp, synthetic construct
  source 1..21: mol_type = other DNA
tccgtcgccgtcctcgtcccc

SEQ ID NO: 2749 - DNA, 21 bp, synthetic construct
  source 1..21: mol_type = other DNA
tccgtcgccgtcctcgtcccc

SEQ ID NO: 2750 - DNA, 21 bp, synthetic construct
  source 1..21: mol_type = other DNA
tccgtcgccgtcctcgtcccc

SEQ ID NO: 2751 - DNA, 21 bp, synthetic construct
  source 1..21: mol_type = other DNA
aacgagtctccgtcgccgtcc

SEQ ID NO: 2752 - DNA, 21 bp, synthetic construct
  source 1..21: mol_type = other DNA
aacgagtctccgtcgccgtcc

SEQ ID NO: 2753 - DNA, 21 bp, synthetic construct
  source 1..21: mol_type = other DNA
aacgagtctccgtcgccgtcc

SEQ ID NO: 2754 - DNA, 21 bp, synthetic construct
  source 1..21: mol_type = other DNA
aacgagtctccgtcgccgtcc

SEQ ID NO: 2755 - DNA, 21 bp, synthetic construct
  source 1..21: mol_type = other DNA
aacgagtctccgtcgccgtcc

SEQ ID NO: 2756 - DNA, 21 bp, synthetic construct
  source 1..21: mol_type = other DNA
aacgagtctccgtcgccgtcc

SEQ ID NO: 2757 - DNA, 21 bp, synthetic construct
  source 1..21: mol_type = other DNA
aacgagtctccgtcgccgtcc

SEQ ID NO: 2758 - DNA, 21 bp, synthetic construct
  source 1..21: mol_type = other DNA
aacgagtctccgtcgccgtcc

SEQ ID NO: 2759 - DNA, 21 bp, synthetic construct
  source 1..21: mol_type = other DNA
aaacgagtctccgtcgccgtc

SEQ ID NO: 2760 - DNA, 21 bp, synthetic construct
  source 1..21: mol_type = other DNA
aaacgagtctccgtcgccgtc

SEQ ID NO: 2761 - DNA, 21 bp, synthetic construct
  source 1..21: mol_type = other DNA
aaacgagtctccgtcgccgtc

SEQ ID NO: 2762 - DNA, 21 bp, synthetic construct
  source 1..21: mol_type = other DNA
aaacgagtctccgtcgccgtc

SEQ ID NO: 2763 - DNA, 21 bp, synthetic construct
  source 1..21: mol_type = other DNA
aaacgagtctccgtcgccgtc

SEQ ID NO: 2764 - DNA, 21 bp, synthetic construct
  source 1..21: mol_type = other DNA
aaacgagtctccgtcgccgtc

SEQ ID NO: 2765 - DNA, 21 bp, synthetic construct
  source 1..21: mol_type = other DNA
aaacgagtctccgtcgccgtc

SEQ ID NO: 2766 - DNA, 21 bp, synthetic construct
  source 1..21: mol_type = other DNA
aaacgagtctccgtcgccgtc

SEQ ID NO: 2767 - DNA, 21 bp, synthetic construct
  source 1..21: mol_type = other DNA
caaacgagtctccgtcgccgt

SEQ ID NO: 2768 - DNA, 21 bp, synthetic construct
  source 1..21: mol_type = other DNA
caaacgagtctccgtcgccgt

SEQ ID NO: 2769 - DNA, 21 bp, synthetic construct
  source 1..21: mol_type = other DNA
caaacgagtctccgtcgccgt

SEQ ID NO: 2770 - DNA, 21 bp, synthetic construct
  source 1..21: mol_type = other DNA
caaacgagtctccgtcgccgt

SEQ ID NO: 2771 - DNA, 21 bp, synthetic construct
  source 1..21: mol_type = other DNA
caaacgagtctccgtcgccgt

SEQ ID NO: 2772 - DNA, 21 bp, synthetic construct
  source 1..21: mol_type = other DNA
caaacgagtctccgtcgccgt

SEQ ID NO: 2773 - DNA, 21 bp, synthetic construct
  source 1..21: mol_type = other DNA
caaacgagtctccgtcgccgt

SEQ ID NO: 2774 - DNA, 21 bp, synthetic construct
  source 1..21: mol_type = other DNA
caaacgagtctccgtcgccgt

SEQ ID NO: 2775 - DNA, 21 bp, synthetic construct
  source 1..21: mol_type = other DNA
ccaaacgagtctccgtcgccg

SEQ ID NO: 2776 - DNA, 21 bp, synthetic construct
  source 1..21: mol_type = other DNA
ccaaacgagtctccgtcgccg

SEQ ID NO: 2777 - DNA, 21 bp, synthetic construct
  source 1..21: mol_type = other DNA
ccaaacgagtctccgtcgccg

SEQ ID NO: 2778 - DNA, 21 bp, synthetic construct
  source 1..21: mol_type = other DNA
ccaaacgagtctccgtcgccg

SEQ ID NO: 2779 - DNA, 21 bp, synthetic construct
  source 1..21: mol_type = other DNA
ccaaacgagtctccgtcgccg

SEQ ID NO: 2780 - DNA, 21 bp, synthetic construct
  source 1..21: mol_type = other DNA
ccaaacgagtctccgtcgccg

SEQ ID NO: 2781 - DNA, 21 bp, synthetic construct
  source 1..21: mol_type = other DNA
ccaaacgagtctccgtcgccg

SEQ ID NO: 2782 - DNA, 21 bp, synthetic construct
  source 1..21: mol_type = other DNA
ccaaacgagtctccgtcgccg

SEQ ID NO: 2783 - DNA, 21 bp, synthetic construct
  source 1..21: mol_type = other DNA
tccaaacgagtctccgtcgcc

SEQ ID NO: 2784 - DNA, 21 bp, synthetic construct
  source 1..21: mol_type = other DNA
tccaaacgagtctccgtcgcc

SEQ ID NO: 2785 - DNA, 21 bp, synthetic construct
  source 1..21: mol_type = other DNA
tccaaacgagtctccgtcgcc

SEQ ID NO: 2786 - DNA, 21 bp, synthetic construct
  source 1..21: mol_type = other DNA
tccaaacgagtctccgtcgcc

SEQ ID NO: 2787 - DNA, 21 bp, synthetic construct
  source 1..21: mol_type = other DNA
tccaaacgagtctccgtcgcc

SEQ ID NO: 2788 - DNA, 21 bp, synthetic construct
  source 1..21: mol_type = other DNA
tccaaacgagtctccgtcgcc

SEQ ID NO: 2789 - DNA, 21 bp, synthetic construct
  source 1..21: mol_type = other DNA
tccaaacgagtctccgtcgcc

SEQ ID NO: 2790 - DNA, 21 bp, synthetic construct
  source 1..21: mol_type = other DNA
tccaaacgagtctccgtcgcc

SEQ ID NO: 2791 - DNA, 21 bp, synthetic construct
  source 1..21: mol_type = other DNA
gtccaaacgagtctccgtcgc

SEQ ID NO: 2792 - DNA, 21 bp, synthetic construct
  source 1..21: mol_type = other DNA
gtccaaacgagtctccgtcgc

SEQ ID NO: 2793 - DNA, 21 bp, synthetic construct
  source 1..21: mol_type = other DNA
gtccaaacgagtctccgtcgc

SEQ ID NO: 2794 - DNA, 21 bp, synthetic construct
  source 1..21: mol_type = other DNA
gtccaaacgagtctccgtcgc

SEQ ID NO: 2795 - DNA, 21 bp, synthetic construct
  source 1..21: mol_type = other DNA
gtccaaacgagtctccgtcgc

SEQ ID NO: 2796 - DNA, 21 bp, synthetic construct
  source 1..21: mol_type = other DNA
gtccaaacgagtctccgtcgc

SEQ ID NO: 2797 - DNA, 21 bp, synthetic construct
  source 1..21: mol_type = other DNA
gtccaaacgagtctccgtcgc

SEQ ID NO: 2798 - DNA, 21 bp, synthetic construct
  source 1..21: mol_type = other DNA
gtccaaacgagtctccgtcgc

SEQ ID NO: 2799 - DNA, 21 bp, synthetic construct
  source 1..21: mol_type = other DNA
aaagcaggctcgcagggcctc

SEQ ID NO: 2800 - DNA, 21 bp, synthetic construct
  source 1..21: mol_type = other DNA
aaagcaggctcgcagggcctc

SEQ ID NO: 2801 - DNA, 21 bp, synthetic construct
  source 1..21: mol_type = other DNA
aaagcaggctcgcagggcctc

SEQ ID NO: 2802 - DNA, 21 bp, synthetic construct
  source 1..21: mol_type = other DNA
aaagcaggctcgcagggcctc

SEQ ID NO: 2803 - DNA, 21 bp, synthetic construct
  source 1..21: mol_type = other DNA
aaagcaggctcgcagggcctc

SEQ ID NO: 2804 - DNA, 21 bp, synthetic construct
  source 1..21: mol_type = other DNA
aaagcaggctcgcagggcctc

SEQ ID NO: 2805 - DNA, 21 bp, synthetic construct
  source 1..21: mol_type = other DNA
aaagcaggctcgcagggcctc

SEQ ID NO: 2806 - DNA, 21 bp, synthetic construct
  source 1..21: mol_type = other DNA
aaagcaggctcgcagggcctc

SEQ ID NO: 2807 - DNA, 21 bp, synthetic construct
  source 1..21: mol_type = other DNA
ctcaaagcaggctcgcagggc

SEQ ID NO: 2808 - DNA, 21 bp, synthetic construct
  source 1..21: mol_type = other DNA
ctcaaagcaggctcgcagggc

SEQ ID NO: 2809 - DNA, 21 bp, synthetic construct
  source 1..21: mol_type = other DNA
ctcaaagcaggctcgcagggc

SEQ ID NO: 2810 - DNA, 21 bp, synthetic construct
  source 1..21: mol_type = other DNA
ctcaaagcaggctcgcagggc

SEQ ID NO: 2811 - DNA, 21 bp, synthetic construct
  source 1..21: mol_type = other DNA
ctcaaagcaggctcgcagggc

SEQ ID NO: 2812 - DNA, 21 bp, synthetic construct
  source 1..21: mol_type = other DNA
ctcaaagcaggctcgcagggc

SEQ ID NO: 2813 - DNA, 21 bp, synthetic construct
  source 1..21: mol_type = other DNA
ctcaaagcaggctcgcagggc

SEQ ID NO: 2814 - DNA, 21 bp, synthetic construct
  source 1..21: mol_type = other DNA
ctcaaagcaggctcgcagggc

SEQ ID NO: 2815 - DNA, 21 bp, synthetic construct
  source 1..21: mol_type = other DNA
tctctggccagctcctcccgg

SEQ ID NO: 2816 - DNA, 21 bp, synthetic construct
  source 1..21: mol_type = other DNA
tctctggccagctcctcccgg

SEQ ID NO: 2817 - DNA, 21 bp, synthetic construct
  source 1..21: mol_type = other DNA
tctctggccagctcctcccgg

SEQ ID NO: 2818 - DNA, 21 bp, synthetic construct
  source 1..21: mol_type = other DNA
tctctggccagctcctcccgg

SEQ ID NO: 2819 - DNA, 21 bp, synthetic construct
  source 1..21: mol_type = other DNA
tctctggccagctcctcccgg

SEQ ID NO: 2820 - DNA, 21 bp, synthetic construct
  source 1..21: mol_type = other DNA
tctctggccagctcctcccgg

SEQ ID NO: 2821 - DNA, 21 bp, synthetic construct
  source 1..21: mol_type = other DNA
tctctggccagctcctcccgg

SEQ ID NO: 2822 - DNA, 21 bp, synthetic construct
  source 1..21: mol_type = other DNA
tctctggccagctcctcccgg

SEQ ID NO: 2823 - DNA, 21 bp, synthetic construct
  source 1..21: mol_type = other DNA
cgtctctctggccagctcctc

SEQ ID NO: 2824 - DNA, 21 bp, synthetic construct
  source 1..21: mol_type = other DNA
cgtctctctggccagctcctc

SEQ ID NO: 2825 - DNA, 21 bp, synthetic construct
  source 1..21: mol_type = other DNA
cgtctctctggccagctcctc

SEQ ID NO: 2826 - DNA, 21 bp, synthetic construct
  source 1..21: mol_type = other DNA
cgtctctctggccagctcctc

SEQ ID NO: 2827 - DNA, 21 bp, synthetic construct
  source 1..21: mol_type = other DNA
cgtctctctggccagctcctc

SEQ ID NO: 2828 - DNA, 21 bp, synthetic construct
  source 1..21: mol_type = other DNA
cgtctctctggccagctcctc

SEQ ID NO: 2829 - DNA, 21 bp, synthetic construct
  source 1..21: mol_type = other DNA
cgtctctctggccagctcctc

SEQ ID NO: 2830 - DNA, 21 bp, synthetic construct
  source 1..21: mol_type = other DNA
cgtctctctggccagctcctc

SEQ ID NO: 2831 - DNA, 21 bp, synthetic construct
  source 1..21: mol_type = other DNA
agatctgaatcctggactccg

SEQ ID NO: 2832 - DNA, 21 bp, synthetic construct
  source 1..21: mol_type = other DNA
agatctgaatcctggactccg

SEQ ID NO: 2833 - DNA, 21 bp, synthetic construct
  source 1..21: mol_type = other DNA
agatctgaatcctggactccg

SEQ ID NO: 2834 - DNA, 21 bp, synthetic construct
  source 1..21: mol_type = other DNA
agatctgaatcctggactccg

SEQ ID NO: 2835 - DNA, 21 bp, synthetic construct
  source 1..21: mol_type = other DNA
agatctgaatcctggactccg

SEQ ID NO: 2836 - DNA, 21 bp, synthetic construct
  source 1..21: mol_type = other DNA
agatctgaatcctggactccg

SEQ ID NO: 2837 - DNA, 21 bp, synthetic construct
  source 1..21: mol_type = other DNA
agatctgaatcctggactccg

SEQ ID NO: 2838 - DNA, 21 bp, synthetic construct
  source 1..21: mol_type = other DNA
agatctgaatcctggactccg

SEQ ID NO: 2839 - DNA, 21 bp, synthetic construct
  source 1..21: mol_type = other DNA
cagatctgaatcctggactcc

SEQ ID NO: 2840 - DNA, 21 bp, synthetic construct
  source 1..21: mol_type = other DNA
cagatctgaatcctggactcc

SEQ ID NO: 2841 - DNA, 21 bp, synthetic construct
  source 1..21: mol_type = other DNA
cagatctgaatcctggactcc

SEQ ID NO: 2842 - DNA, 21 bp, synthetic construct
  source 1..21: mol_type = other DNA
cagatctgaatcctggactcc

SEQ ID NO: 2843 - DNA, 21 bp, synthetic construct
  source 1..21: mol_type = other DNA
cagatctgaatcctggactcc

SEQ ID NO: 2844 - DNA, 21 bp, synthetic construct
  source 1..21: mol_type = other DNA
cagatctgaatcctggactcc

SEQ ID NO: 2845 - DNA, 21 bp, synthetic construct
  source 1..21: mol_type = other DNA
cagatctgaatcctggactcc

SEQ ID NO: 2846 - DNA, 21 bp, synthetic construct
  source 1..21: mol_type = other DNA
cagatctgaatcctggactcc

SEQ ID NO: 2847 - DNA, 21 bp, synthetic construct
  source 1..21: mol_type = other DNA
ccagatctgaatcctggactc

SEQ ID NO: 2848 - DNA, 21 bp, synthetic construct
  source 1..21: mol_type = other DNA
ccagatctgaatcctggactc

SEQ ID NO: 2849 - DNA, 21 bp, synthetic construct
  source 1..21: mol_type = other DNA
ccagatctgaatcctggactc

SEQ ID NO: 2850 - DNA, 21 bp, synthetic construct
  source 1..21: mol_type = other DNA
ccagatctgaatcctggactc

SEQ ID NO: 2851 - DNA, 21 bp, synthetic construct
  source 1..21: mol_type = other DNA
ccagatctgaatcctggactc

SEQ ID NO: 2852 - DNA, 21 bp, synthetic construct
  source 1..21: mol_type = other DNA
ccagatctgaatcctggactc

SEQ ID NO: 2853 - DNA, 21 bp, synthetic construct
  source 1..21: mol_type = other DNA
ccagatctgaatcctggactc

SEQ ID NO: 2854 - DNA, 21 bp, synthetic construct
  source 1..21: mol_type = other DNA
ccagatctgaatcctggactc

SEQ ID NO: 2855 - DNA, 21 bp, synthetic construct
  source 1..21: mol_type = other DNA
aaaccagatctgaatcctgga

SEQ ID NO: 2856 - DNA, 21 bp, synthetic construct
  source 1..21: mol_type = other DNA
aaaccagatctgaatcctgga

SEQ ID NO: 2857 - DNA, 21 bp, synthetic construct
  source 1..21: mol_type = other DNA
aaaccagatctgaatcctgga

SEQ ID NO: 2858 - DNA, 21 bp, synthetic construct
  source 1..21: mol_type = other DNA
aaaccagatctgaatcctgga

SEQ ID NO: 2859 - DNA, 21 bp, synthetic construct
  source 1..21: mol_type = other DNA
aaaccagatctgaatcctgga

SEQ ID NO: 2860 - DNA, 21 bp, synthetic construct
  source 1..21: mol_type = other DNA
aaaccagatctgaatcctgga

SEQ ID NO: 2861 - DNA, 21 bp, synthetic construct
  source 1..21: mol_type = other DNA
aaaccagatctgaatcctgga

SEQ ID NO: 2862 - DNA, 21 bp, synthetic construct
  source 1..21: mol_type = other DNA
aaaccagatctgaatcctgga

SEQ ID NO: 2863 - DNA, 21 bp, synthetic construct
  source 1..21: mol_type = other DNA
gaaaccagatctgaatcctgg

SEQ ID NO: 2864 - DNA, 21 bp, synthetic construct
  source 1..21: mol_type = other DNA
gaaaccagatctgaatcctgg

SEQ ID NO: 2865 - DNA, 21 bp, synthetic construct
  source 1..21: mol_type = other DNA
gaaaccagatctgaatcctgg

SEQ ID NO: 2866 - DNA, 21 bp, synthetic construct
  source 1..21: mol_type = other DNA
gaaaccagatctgaatcctgg

SEQ ID NO: 2867 - DNA, 21 bp, synthetic construct
  source 1..21: mol_type = other DNA
gaaaccagatctgaatcctgg

SEQ ID NO: 2868 - DNA, 21 bp, synthetic construct
  source 1..21: mol_type = other DNA
gaaaccagatctgaatcctgg

SEQ ID NO: 2869 - DNA, 21 bp, synthetic construct
  source 1..21: mol_type = other DNA
gaaaccagatctgaatcctgg

SEQ ID NO: 2870 - DNA, 21 bp, synthetic construct
  source 1..21: mol_type = other DNA
gaaaccagatctgaatcctgg

SEQ ID NO: 2871 - DNA, 21 bp, synthetic construct
  source 1..21: mol_type = other DNA
tgaaaccagatctgaatcctg

SEQ ID NO: 2872 - DNA, 21 bp, synthetic construct
  source 1..21: mol_type = other DNA
tgaaaccagatctgaatcctg

SEQ ID NO: 2873 - DNA, 21 bp, synthetic construct
  source 1..21: mol_type = other DNA
tgaaaccagatctgaatcctg

SEQ ID NO: 2874 - DNA, 21 bp, synthetic construct
  source 1..21: mol_type = other DNA
tgaaaccagatctgaatcctg

SEQ ID NO: 2875 - DNA, 21 bp, synthetic construct
  source 1..21: mol_type = other DNA
tgaaaccagatctgaatcctg

SEQ ID NO: 2876 - DNA, 21 bp, synthetic construct
  source 1..21: mol_type = other DNA
tgaaaccagatctgaatcctg

SEQ ID NO: 2877 - DNA, 21 bp, synthetic construct
  source 1..21: mol_type = other DNA
tgaaaccagatctgaatcctg

SEQ ID NO: 2878 - DNA, 21 bp, synthetic construct
  source 1..21: mol_type = other DNA
tgaaaccagatctgaatcctg

SEQ ID NO: 2879 - DNA, 21 bp, synthetic construct
  source 1..21: mol_type = other DNA
tctgaaaccagatctgaatcc

SEQ ID NO: 2880 - DNA, 21 bp, synthetic construct
  source 1..21: mol_type = other DNA
tctgaaaccagatctgaatcc

SEQ ID NO: 2881 - DNA, 21 bp, synthetic construct
  source 1..21: mol_type = other DNA
tctgaaaccagatctgaatcc

SEQ ID NO: 2882 - DNA, 21 bp, synthetic construct
  source 1..21: mol_type = other DNA
tctgaaaccagatctgaatcc

SEQ ID NO: 2883 - DNA, 21 bp, synthetic construct
  source 1..21: mol_type = other DNA
tctgaaaccagatctgaatcc

SEQ ID NO: 2884 - DNA, 21 bp, synthetic construct
  source 1..21: mol_type = other DNA
tctgaaaccagatctgaatcc

SEQ ID NO: 2885 - DNA, 21 bp, synthetic construct
  source 1..21: mol_type = other DNA
tctgaaaccagatctgaatcc

SEQ ID NO: 2886 - DNA, 21 bp, synthetic construct
  source 1..21: mol_type = other DNA
tctgaaaccagatctgaatcc

SEQ ID NO: 2887 - DNA, 21 bp, synthetic construct
  source 1..21: mol_type = other DNA
cccccgccgggggccgcgctg

SEQ ID NO: 2888 - DNA, 21 bp, synthetic construct
  source 1..21: mol_type = other DNA
cccccgccgggggccgcgctg

SEQ ID NO: 2889 - DNA, 21 bp, synthetic construct
  source 1..21: mol_type = other DNA
cccccgccgggggccgcgctg

SEQ ID NO: 2890 - DNA, 21 bp, synthetic construct
  source 1..21: mol_type = other DNA
cccccgccgggggccgcgctg

SEQ ID NO: 2891 - DNA, 21 bp, synthetic construct
  source 1..21: mol_type = other DNA
cccccgccgggggccgcgctg

SEQ ID NO: 2892 - DNA, 21 bp, synthetic construct
  source 1..21: mol_type = other DNA
cccccgccgggggccgcgctg

SEQ ID NO: 2893 - DNA, 21 bp, synthetic construct
  source 1..21: mol_type = other DNA
cccccgccgggggccgcgctg

SEQ ID NO: 2894 - DNA, 21 bp, synthetic construct
  source 1..21: mol_type = other DNA
cccccgccgggggccgcgctg

SEQ ID NO: 2895 - DNA, 21 bp, synthetic construct
  source 1..21: mol_type = other DNA
ttccccacgcgccggtgtggg

SEQ ID NO: 2896 - DNA, 21 bp, synthetic construct
  source 1..21: mol_type = other DNA
ttccccacgcgccggtgtggg

SEQ ID NO: 2897 - DNA, 21 bp, synthetic construct
  source 1..21: mol_type = other DNA
ttccccacgcgccggtgtggg

SEQ ID NO: 2898 - DNA, 21 bp, synthetic construct
  source 1..21: mol_type = other DNA
ttccccacgcgccggtgtggg

SEQ ID NO: 2899 - DNA, 21 bp, synthetic construct
  source 1..21: mol_type = other DNA
ttccccacgcgccggtgtggg

SEQ ID NO: 2900 - DNA, 21 bp, synthetic construct
  source 1..21: mol_type = other DNA
ttccccacgcgccggtgtggg

SEQ ID NO: 2901 - DNA, 21 bp, synthetic construct
  source 1..21: mol_type = other DNA
ttccccacgcgccggtgtggg

SEQ ID NO: 2902 - DNA, 21 bp, synthetic construct
  source 1..21: mol_type = other DNA
ttccccacgcgccggtgtggg

SEQ ID NO: 2903 - DNA, 21 bp, synthetic construct
  source 1..21: mol_type = other DNA
cacgaaagccccctgtgggag

SEQ ID NO: 2904 - DNA, 21 bp, synthetic construct
  source 1..21: mol_type = other DNA
cacgaaagccccctgtgggag

SEQ ID NO: 2905 - DNA, 21 bp, synthetic construct
  source 1..21: mol_type = other DNA
cacgaaagccccctgtgggag

SEQ ID NO: 2906 - DNA, 21 bp, synthetic construct
  source 1..21: mol_type = other DNA
cacgaaagccccctgtgggag

SEQ ID NO: 2907 - DNA, 21 bp, synthetic construct
  source 1..21: mol_type = other DNA
cacgaaagccccctgtgggag

SEQ ID NO: 2908 - DNA, 21 bp, synthetic construct
  source 1..21: mol_type = other DNA
cacgaaagccccctgtgggag

SEQ ID NO: 2909 - DNA, 21 bp, synthetic construct
  source 1..21: mol_type = other DNA
cacgaaagccccctgtgggag

SEQ ID NO: 2910 - DNA, 21 bp, synthetic construct
  source 1..21: mol_type = other DNA
cacgaaagccccctgtgggag

SEQ ID NO: 2911 - DNA, 21 bp, synthetic construct
  source 1..21: mol_type = other DNA
aggcgaaatccccgcgcgccg

SEQ ID NO: 2912 - DNA, 21 bp, synthetic construct
  source 1..21: mol_type = other DNA
aggcgaaatccccgcgcgccg

SEQ ID NO: 2913 - DNA, 21 bp, synthetic construct
  source 1..21: mol_type = other DNA
aggcgaaatccccgcgcgccg

SEQ ID NO: 2914 - DNA, 21 bp, synthetic construct
  source 1..21: mol_type = other DNA
aggcgaaatccccgcgcgccg

SEQ ID NO: 2915 - DNA, 21 bp, synthetic construct
  source 1..21: mol_type = other DNA
aggcgaaatccccgcgcgccg

SEQ ID NO: 2916 - DNA, 21 bp, synthetic construct
  source 1..21: mol_type = other DNA
aggcgaaatccccgcgcgccg

SEQ ID NO: 2917 - DNA, 21 bp, synthetic construct
  source 1..21: mol_type = other DNA
aggcgaaatccccgcgcgccg

SEQ ID NO: 2918 - DNA, 21 bp, synthetic construct
  source 1..21: mol_type = other DNA
aggcgaaatccccgcgcgccg

SEQ ID NO: 2919 - DNA, 21 bp, synthetic construct
  source 1..21: mol_type = other DNA
taggcgaaatccccgcgcgcc

SEQ ID NO: 2920 - DNA, 21 bp, synthetic construct
  source 1..21: mol_type = other DNA
taggcgaaatccccgcgcgcc

SEQ ID NO: 2921 - DNA, 21 bp, synthetic construct
  source 1..21: mol_type = other DNA
taggcgaaatccccgcgcgcc

SEQ ID NO: 2922 - DNA, 21 bp, synthetic construct
  source 1..21: mol_type = other DNA
taggcgaaatccccgcgcgcc

SEQ ID NO: 2923 - DNA, 21 bp, synthetic construct
  source 1..21: mol_type = other DNA
taggcgaaatccccgcgcgcc

SEQ ID NO: 2924 - DNA, 21 bp, synthetic construct
  source 1..21: mol_type = other DNA
taggcgaaatccccgcgcgcc

SEQ ID NO: 2925 - DNA, 21 bp, synthetic construct
  source 1..21: mol_type = other DNA
taggcgaaatccccgcgcgcc

SEQ ID NO: 2926 - DNA, 21 bp, synthetic construct
  source 1..21: mol_type = other DNA
taggcgaaatccccgcgcgcc

SEQ ID NO: 2927 - DNA, 21 bp, synthetic construct
  source 1..21: mol_type = other DNA
gtaggcgaaatccccgcgcgc

SEQ ID NO: 2928 - DNA, 21 bp, synthetic construct
  source 1..21: mol_type = other DNA
gtaggcgaaatccccgcgcgc

SEQ ID NO: 2929 - DNA, 21 bp, synthetic construct
  source 1..21: mol_type = other DNA
gtaggcgaaatccccgcgcgc

SEQ ID NO: 2930 - DNA, 21 bp, synthetic construct
  source 1..21: mol_type = other DNA
gtaggcgaaatccccgcgcgc

SEQ ID NO: 2931 - DNA, 21 bp, synthetic construct
  source 1..21: mol_type = other DNA
gtaggcgaaatccccgcgcgc

SEQ ID NO: 2932 - DNA, 21 bp, synthetic construct
  source 1..21: mol_type = other DNA
gtaggcgaaatccccgcgcgc

SEQ ID NO: 2933 - DNA, 21 bp, synthetic construct
  source 1..21: mol_type = other DNA
gtaggcgaaatccccgcgcgc

SEQ ID NO: 2934 - DNA, 21 bp, synthetic construct
  source 1..21: mol_type = other DNA
gtaggcgaaatccccgcgcgc

SEQ ID NO: 2935 - DNA, 21 bp, synthetic construct
  source 1..21: mol_type = other DNA
ccaccgaggagcctgagggtg

SEQ ID NO: 2936 - DNA, 21 bp, synthetic construct
  source 1..21: mol_type = other DNA
ccaccgaggagcctgagggtg

SEQ ID NO: 2937 - DNA, 21 bp, synthetic construct
  source 1..21: mol_type = other DNA
ccaccgaggagcctgagggtg

SEQ ID NO: 2938 - DNA, 21 bp, synthetic construct
  source 1..21: mol_type = other DNA
ccaccgaggagcctgagggtg

SEQ ID NO: 2939 - DNA, 21 bp, synthetic construct
  source 1..21: mol_type = other DNA
ccaccgaggagcctgagggtg

SEQ ID NO: 2940 - DNA, 21 bp, synthetic construct
  source 1..21: mol_type = other DNA
ccaccgaggagcctgagggtg

SEQ ID NO: 2941 - DNA, 21 bp, synthetic construct
  source 1..21: mol_type = other DNA
ccaccgaggagcctgagggtg

SEQ ID NO: 2942 - DNA, 21 bp, synthetic construct
  source 1..21: mol_type = other DNA
ccaccgaggagcctgagggtg

SEQ ID NO: 2943 - DNA, 21 bp, synthetic construct
  source 1..21: mol_type = other DNA
tgcggaggccaccgaggagcc

SEQ ID NO: 2944 - DNA, 21 bp, synthetic construct
  source 1..21: mol_type = other DNA
tgcggaggccaccgaggagcc

SEQ ID NO: 2945 - DNA, 21 bp, synthetic construct
  source 1..21: mol_type = other DNA
tgcggaggccaccgaggagcc

SEQ ID NO: 2946 - DNA, 21 bp, synthetic construct
  source 1..21: mol_type = other DNA
tgcggaggccaccgaggagcc

SEQ ID NO: 2947 - DNA, 21 bp, synthetic construct
  source 1..21: mol_type = other DNA
tgcggaggccaccgaggagcc

SEQ ID NO: 2948 - DNA, 21 bp, synthetic construct
  source 1..21: mol_type = other DNA
tgcggaggccaccgaggagcc

SEQ ID NO: 2949 - DNA, 21 bp, synthetic construct
  source 1..21: mol_type = other DNA
tgcggaggccaccgaggagcc

SEQ ID NO: 2950 - DNA, 21 bp, synthetic construct
  source 1..21: mol_type = other DNA
tgcggaggccaccgaggagcc

SEQ ID NO: 2951 - DNA, 21 bp, synthetic construct
  source 1..21: mol_type = other DNA
tcccggtcctcccggcttttg

SEQ ID NO: 2952 - DNA, 21 bp, synthetic construct
  source 1..21: mol_type = other DNA
tcccggtcctcccggcttttg

SEQ ID NO: 2953 - DNA, 21 bp, synthetic construct
  source 1..21: mol_type = other DNA
tcccggtcctcccggcttttg

SEQ ID NO: 2954 - DNA, 21 bp, synthetic construct
  source 1..21: mol_type = other DNA
tcccggtcctcccggcttttg

SEQ ID NO: 2955 - DNA, 21 bp, synthetic construct
  source 1..21: mol_type = other DNA
tcccggtcctcccggcttttg

SEQ ID NO: 2956 - DNA, 21 bp, synthetic construct
  source 1..21: mol_type = other DNA
tcccggtcctcccggcttttg

SEQ ID NO: 2957 - DNA, 21 bp, synthetic construct
  source 1..21: mol_type = other DNA
tcccggtcctcccggcttttg

SEQ ID NO: 2958 - DNA, 21 bp, synthetic construct
  source 1..21: mol_type = other DNA
tcccggtcctcccggcttttg

SEQ ID NO: 2959 - DNA, 21 bp, synthetic construct
  source 1..21: mol_type = other DNA
cttgagcgggcccaggctgtg

SEQ ID NO: 2960 - DNA, 21 bp, synthetic construct
  source 1..21: mol_type = other DNA
cttgagcgggcccaggctgtg

SEQ ID NO: 2961 - DNA, 21 bp, synthetic construct
  source 1..21: mol_type = other DNA
cttgagcgggcccaggctgtg

SEQ ID NO: 2962 - DNA, 21 bp, synthetic construct
  source 1..21: mol_type = other DNA
cttgagcgggcccaggctgtg

SEQ ID NO: 2963 - DNA, 21 bp, synthetic construct
  source 1..21: mol_type = other DNA
cttgagcgggcccaggctgtg

SEQ ID NO: 2964 - DNA, 21 bp, synthetic construct
  source 1..21: mol_type = other DNA
cttgagcgggcccaggctgtg

SEQ ID NO: 2965 - DNA, 21 bp, synthetic construct
  source 1..21: mol_type = other DNA
cttgagcgggcccaggctgtg

SEQ ID NO: 2966 - DNA, 21 bp, synthetic construct
  source 1..21: mol_type = other DNA
cttgagcgggcccaggctgtg

SEQ ID NO: 2967 - DNA, 21 bp, synthetic construct
  source 1..21: mol_type = other DNA
tggccctgcggccccgcttga

SEQ ID NO: 2968 - DNA, 21 bp, synthetic construct
  source 1..21: mol_type = other DNA
tggccctgcggccccgcttga

SEQ ID NO: 2969 - DNA, 21 bp, synthetic construct
  source 1..21: mol_type = other DNA
tggccctgcggccccgcttga

SEQ ID NO: 2970 - DNA, 21 bp, synthetic construct
  source 1..21: mol_type = other DNA
tggccctgcggccccgcttga

SEQ ID NO: 2971 - DNA, 21 bp, synthetic construct
  source 1..21: mol_type = other DNA
tggccctgcggccccgcttga

SEQ ID NO: 2972 - DNA, 21 bp, synthetic construct
  source 1..21: mol_type = other DNA
tggccctgcggccccgcttga

SEQ ID NO: 2973 - DNA, 21 bp, synthetic construct
  source 1..21: mol_type = other DNA
tggccctgcggccccgcttga

SEQ ID NO: 2974 - DNA, 21 bp, synthetic construct
  source 1..21: mol_type = other DNA
tggccctgcggccccgcttga

SEQ ID NO: 2975 - DNA, 21 bp, synthetic construct
  source 1..21: mol_type = other DNA
tgcctggcccttcgattctga

SEQ ID NO: 2976 - DNA, 21 bp, synthetic construct
  source 1..21: mol_type = other DNA
tgcctggcccttcgattctga

SEQ ID NO: 2977 - DNA, 21 bp, synthetic construct
  source 1..21: mol_type = other DNA
tgcctggcccttcgattctga

SEQ ID NO: 2978 - DNA, 21 bp, synthetic construct
  source 1..21: mol_type = other DNA
tgcctggcccttcgattctga

SEQ ID NO: 2979 - DNA, 21 bp, synthetic construct
  source 1..21: mol_type = other DNA
tgcctggcccttcgattctga

SEQ ID NO: 2980 - DNA, 21 bp, synthetic construct
  source 1..21: mol_type = other DNA
tgcctggcccttcgattctga

SEQ ID NO: 2981 - DNA, 21 bp, synthetic construct
  source 1..21: mol_type = other DNA
tgcctggcccttcgattctga

SEQ ID NO: 2982 - DNA, 21 bp, synthetic construct
  source 1..21: mol_type = other DNA
tgcctggcccttcgattctga

SEQ ID NO: 2983 - DNA, 21 bp, synthetic construct
  source 1..21: mol_type = other DNA
gtgcctggcccttcgattctg

SEQ ID NO: 2984 - DNA, 21 bp, synthetic construct
  source 1..21: mol_type = other DNA
gtgcctggcccttcgattctg

SEQ ID NO: 2985 - DNA, 21 bp, synthetic construct
  source 1..21: mol_type = other DNA
gtgcctggcccttcgattctg

SEQ ID NO: 2986 - DNA, 21 bp, synthetic construct
  source 1..21: mol_type = other DNA
gtgcctggcccttcgattctg

SEQ ID NO: 2987 - DNA, 21 bp, synthetic construct
  source 1..21: mol_type = other DNA
gtgcctggcccttcgattctg

SEQ ID NO: 2988 - DNA, 21 bp, synthetic construct
  source 1..21: mol_type = other DNA
gtgcctggcccttcgattctg

SEQ ID NO: 2989 - DNA, 21 bp, synthetic construct
  source 1..21: mol_type = other DNA
gtgcctggcccttcgattctg

SEQ ID NO: 2990 - DNA, 21 bp, synthetic construct
  source 1..21: mol_type = other DNA
gtgcctggcccttcgattctg

SEQ ID NO: 2991 - DNA, 21 bp, synthetic construct
  source 1..21: mol_type = other DNA
ggtgcctggcccttcgattct

SEQ ID NO: 2992 - DNA, 21 bp, synthetic construct
  source 1..21: mol_type = other DNA
ggtgcctggcccttcgattct

SEQ ID NO: 2993 - DNA, 21 bp, synthetic construct
  source 1..21: mol_type = other DNA
ggtgcctggcccttcgattct

SEQ ID NO: 2994 - DNA, 21 bp, synthetic construct
  source 1..21: mol_type = other DNA
ggtgcctggcccttcgattct

SEQ ID NO: 2995 - DNA, 21 bp, synthetic construct
  source 1..21: mol_type = other DNA
ggtgcctggcccttcgattct

SEQ ID NO: 2996 - DNA, 21 bp, synthetic construct
  source 1..21: mol_type = other DNA
ggtgcctggcccttcgattct

SEQ ID NO: 2997 - DNA, 21 bp, synthetic construct
  source 1..21: mol_type = other DNA
ggtgcctggcccttcgattct

SEQ ID NO: 2998 - DNA, 21 bp, synthetic construct
  source 1..21: mol_type = other DNA
ggtgcctggcccttcgattct

SEQ ID NO: 2999 - DNA, 21 bp, synthetic construct
  source 1..21: mol_type = other DNA
gggtgcctggcccttcgattc

SEQ ID NO: 3000 - DNA, 21 bp, synthetic construct
  source 1..21: mol_type = other DNA
gggtgcctggcccttcgattc

SEQ ID NO: 3001 - DNA, 21 bp, synthetic construct
  source 1..21: mol_type = other DNA
gggtgcctggcccttcgattc

SEQ ID NO: 3002 - DNA, 21 bp, synthetic construct
  source 1..21: mol_type = other DNA
gggtgcctggcccttcgattc

SEQ ID NO: 3003 - DNA, 21 bp, synthetic construct
  source 1..21: mol_type = other DNA
gggtgcctggcccttcgattc

SEQ ID NO: 3004 - DNA, 21 bp, synthetic construct
  source 1..21: mol_type = other DNA
gggtgcctggcccttcgattc

SEQ ID NO: 3005 - DNA, 21 bp, synthetic construct
  source 1..21: mol_type = other DNA
gggtgcctggcccttcgattc

SEQ ID NO: 3006 - DNA, 21 bp, synthetic construct
  source 1..21: mol_type = other DNA
gggtgcctggcccttcgattc

SEQ ID NO: 3007 - DNA, 21 bp, synthetic construct
  source 1..21: mol_type = other DNA
cgggtgcctggcccttcgatt

SEQ ID NO: 3008 - DNA, 21 bp, synthetic construct
  source 1..21: mol_type = other DNA
cgggtgcctggcccttcgatt

SEQ ID NO: 3009 - DNA, 21 bp, synthetic construct
  source 1..21: mol_type = other DNA
cgggtgcctggcccttcgatt

SEQ ID NO: 3010 - DNA, 21 bp, synthetic construct
  source 1..21: mol_type = other DNA
cgggtgcctggcccttcgatt

SEQ ID NO: 3011 - DNA, 21 bp, synthetic construct
  source 1..21: mol_type = other DNA
cgggtgcctggcccttcgatt

SEQ ID NO: 3012 - DNA, 21 bp, synthetic construct
  source 1..21: mol_type = other DNA
cgggtgcctggcccttcgatt

SEQ ID NO: 3013 - DNA, 21 bp, synthetic construct
  source 1..21: mol_type = other DNA
cgggtgcctggcccttcgatt

SEQ ID NO: 3014 - DNA, 21 bp, synthetic construct
  source 1..21: mol_type = other DNA
cgggtgcctggcccttcgatt

SEQ ID NO: 3015 - DNA, 21 bp, synthetic construct
  source 1..21: mol_type = other DNA
ccgggtgcctggcccttcgat

SEQ ID NO: 3016 - DNA, 21 bp, synthetic construct
  source 1..21: mol_type = other DNA
ccgggtgcctggcccttcgat

SEQ ID NO: 3017 - DNA, 21 bp, synthetic construct
  source 1..21: mol_type = other DNA
ccgggtgcctggcccttcgat

SEQ ID NO: 3018 - DNA, 21 bp, synthetic construct
  source 1..21: mol_type = other DNA
ccgggtgcctggcccttcgat

SEQ ID NO: 3019 - DNA, 21 bp, synthetic construct
  source 1..21: mol_type = other DNA
ccgggtgcctggcccttcgat

SEQ ID NO: 3020 - DNA, 21 bp, synthetic construct
  source 1..21: mol_type = other DNA
ccgggtgcctggcccttcgat

SEQ ID NO: 3021 - DNA, 21 bp, synthetic construct
  source 1..21: mol_type = other DNA
ccgggtgcctggcccttcgat

SEQ ID NO: 3022 - DNA, 21 bp, synthetic construct
  source 1..21: mol_type = other DNA
ccgggtgcctggcccttcgat

SEQ ID NO: 3023 - DNA, 21 bp, synthetic construct
  source 1..21: mol_type = other DNA
cccgggtgcctggcccttcga

SEQ ID NO: 3024 - DNA, 21 bp, synthetic construct
  source 1..21: mol_type = other DNA
cccgggtgcctggcccttcga

SEQ ID NO: 3025 - DNA, 21 bp, synthetic construct
  source 1..21: mol_type = other DNA
cccgggtgcctggcccttcga

SEQ ID NO: 3026 - DNA, 21 bp, synthetic construct
  source 1..21: mol_type = other DNA
cccgggtgcctggcccttcga

SEQ ID NO: 3027 - DNA, 21 bp, synthetic construct
  source 1..21: mol_type = other DNA
cccgggtgcctggcccttcga

SEQ ID NO: 3028 - DNA, 21 bp, synthetic construct
  source 1..21: mol_type = other DNA
cccgggtgcctggcccttcga

SEQ ID NO: 3029 - DNA, 21 bp, synthetic construct
  source 1..21: mol_type = other DNA
cccgggtgcctggcccttcga

SEQ ID NO: 3030 - DNA, 21 bp, synthetic construct
  source 1..21: mol_type = other DNA
cccgggtgcctggcccttcga

SEQ ID NO: 3031 - DNA, 21 bp, synthetic construct
  source 1..21: mol_type = other DNA
tcccgggtgcctggcccttcg

SEQ ID NO: 3032 - DNA, 21 bp, synthetic construct
  source 1..21: mol_type = other DNA
tcccgggtgcctggcccttcg

SEQ ID NO: 3033 - DNA, 21 bp, synthetic construct
  source 1..21: mol_type = other DNA
tcccgggtgcctggcccttcg

SEQ ID NO: 3034 - DNA, 21 bp, synthetic construct
  source 1..21: mol_type = other DNA
tcccgggtgcctggcccttcg

SEQ ID NO: 3035 - DNA, 21 bp, synthetic construct
  source 1..21: mol_type = other DNA
tcccgggtgcctggcccttcg

SEQ ID NO: 3036 - DNA, 21 bp, synthetic construct
  source 1..21: mol_type = other DNA
tcccgggtgcctggcccttcg

SEQ ID NO: 3037 - DNA, 21 bp, synthetic construct
  source 1..21: mol_type = other DNA
tcccgggtgcctggcccttcg

SEQ ID NO: 3038 - DNA, 21 bp, synthetic construct
  source 1..21: mol_type = other DNA
tcccgggtgcctggcccttcg

SEQ ID NO: 3039 - DNA, 21 bp, synthetic construct
  source 1..21: mol_type = other DNA
gtcccgggtgcctggcccttc

SEQ ID NO: 3040 - DNA, 21 bp, synthetic construct
  source 1..21: mol_type = other DNA
gtcccgggtgcctggcccttc

SEQ ID NO: 3041 - DNA, 21 bp, synthetic construct
  source 1..21: mol_type = other DNA
gtcccgggtgcctggcccttc

SEQ ID NO: 3042 - DNA, 21 bp, synthetic construct
  source 1..21: mol_type = other DNA
gtcccgggtgcctggcccttc

SEQ ID NO: 3043 - DNA, 21 bp, synthetic construct
  source 1..21: mol_type = other DNA
gtcccgggtgcctggcccttc

SEQ ID NO: 3044 - DNA, 21 bp, synthetic construct
  source 1..21: mol_type = other DNA
gtcccgggtgcctggcccttc

SEQ ID NO: 3045 - DNA, 21 bp, synthetic construct
  source 1..21: mol_type = other DNA
gtcccgggtgcctggcccttc

SEQ ID NO: 3046 - DNA, 21 bp, synthetic construct
  source 1..21: mol_type = other DNA
gtcccgggtgcctggcccttc

SEQ ID NO: 3047 - DNA, 21 bp, synthetic construct
  source 1..21: mol_type = other DNA
tgtcccgggtgcctggccctt

SEQ ID NO: 3048 - DNA, 21 bp, synthetic construct
  source 1..21: mol_type = other DNA
tgtcccgggtgcctggccctt

SEQ ID NO: 3049 - DNA, 21 bp, synthetic construct
  source 1..21: mol_type = other DNA
tgtcccgggtgcctggccctt

SEQ ID NO: 3050 - DNA, 21 bp, synthetic construct
  source 1..21: mol_type = other DNA
tgtcccgggtgcctggccctt

SEQ ID NO: 3051 - DNA, 21 bp, synthetic construct
  source 1..21: mol_type = other DNA
tgtcccgggtgcctggccctt

SEQ ID NO: 3052 - DNA, 21 bp, synthetic construct
  source 1..21: mol_type = other DNA
tgtcccgggtgcctggccctt

SEQ ID NO: 3053 - DNA, 21 bp, synthetic construct
  source 1..21: mol_type = other DNA
tgtcccgggtgcctggccctt

SEQ ID NO: 3054 - DNA, 21 bp, synthetic construct
  source 1..21: mol_type = other DNA
tgtcccgggtgcctggccctt

SEQ ID NO: 3055 - DNA, 21 bp, synthetic construct
  source 1..21: mol_type = other DNA
cctgtcccgggtgcctggccc

SEQ ID NO: 3056 - DNA, 21 bp, synthetic construct
  source 1..21: mol_type = other DNA
cctgtcccgggtgcctggccc

SEQ ID NO: 3057 - DNA, 21 bp, synthetic construct
  source 1..21: mol_type = other DNA
cctgtcccgggtgcctggccc

SEQ ID NO: 3058 - DNA, 21 bp, synthetic construct
  source 1..21: mol_type = other DNA
cctgtcccgggtgcctggccc

SEQ ID NO: 3059 - DNA, 21 bp, synthetic construct
  source 1..21: mol_type = other DNA
cctgtcccgggtgcctggccc

SEQ ID NO: 3060 - DNA, 21 bp, synthetic construct
  source 1..21: mol_type = other DNA
cctgtcccgggtgcctggccc

SEQ ID NO: 3061 - DNA, 21 bp, synthetic construct
  source 1..21: mol_type = other DNA
cctgtcccgggtgcctggccc

SEQ ID NO: 3062 - DNA, 21 bp, synthetic construct
  source 1..21: mol_type = other DNA
cctgtcccgggtgcctggccc

SEQ ID NO: 3063 - DNA, 21 bp, synthetic construct
  source 1..21: mol_type = other DNA
ccctgtcccgggtgcctggcc

SEQ ID NO: 3064 - DNA, 21 bp, synthetic construct
  source 1..21: mol_type = other DNA
ccctgtcccgggtgcctggcc

SEQ ID NO: 3065 - DNA, 21 bp, synthetic construct
  source 1..21: mol_type = other DNA
ccctgtcccgggtgcctggcc

SEQ ID NO: 3066 - DNA, 21 bp, synthetic construct
  source 1..21: mol_type = other DNA
ccctgtcccgggtgcctggcc

SEQ ID NO: 3067 - DNA, 21 bp, synthetic construct
  source 1..21: mol_type = other DNA
ccctgtcccgggtgcctggcc

SEQ ID NO: 3068 - DNA, 21 bp, synthetic construct
  source 1..21: mol_type = other DNA
ccctgtcccgggtgcctggcc

SEQ ID NO: 3069 - DNA, 21 bp, synthetic construct
  source 1..21: mol_type = other DNA
ccctgtcccgggtgcctggcc

SEQ ID NO: 3070 - DNA, 21 bp, synthetic construct
  source 1..21: mol_type = other DNA
ccctgtcccgggtgcctggcc

SEQ ID NO: 3071 - DNA, 21 bp, synthetic construct
  source 1..21: mol_type = other DNA
accctgtcccgggtgcctggc

SEQ ID NO: 3072 - DNA, 21 bp, synthetic construct
  source 1..21: mol_type = other DNA
accctgtcccgggtgcctggc

SEQ ID NO: 3073 - DNA, 21 bp, synthetic construct
  source 1..21: mol_type = other DNA
accctgtcccgggtgcctggc

SEQ ID NO: 3074 - DNA, 21 bp, synthetic construct
  source 1..21: mol_type = other DNA
accctgtcccgggtgcctggc

SEQ ID NO: 3075 - DNA, 21 bp, synthetic construct
  source 1..21: mol_type = other DNA
accctgtcccgggtgcctggc

SEQ ID NO: 3076 - DNA, 21 bp, synthetic construct
  source 1..21: mol_type = other DNA
accctgtcccgggtgcctggc

SEQ ID NO: 3077 - DNA, 21 bp, synthetic construct
  source 1..21: mol_type = other DNA
accctgtcccgggtgcctggc

SEQ ID NO: 3078 - DNA, 21 bp, synthetic construct
  source 1..21: mol_type = other DNA
accctgtcccgggtgcctggc

SEQ ID NO: 3079 - DNA, 21 bp, synthetic construct
  source 1..21: mol_type = other DNA
caccctgtcccgggtgcctgg

SEQ ID NO: 3080 - DNA, 21 bp, synthetic construct
  source 1..21: mol_type = other DNA
caccctgtcccgggtgcctgg

SEQ ID NO: 3081 - DNA, 21 bp, synthetic construct
  source 1..21: mol_type = other DNA
caccctgtcccgggtgcctgg

SEQ ID NO: 3082 - DNA, 21 bp, synthetic construct
  source 1..21: mol_type = other DNA
caccctgtcccgggtgcctgg

SEQ ID NO: 3083 - DNA, 21 bp, synthetic construct
  source 1..21: mol_type = other DNA
caccctgtcccgggtgcctgg

SEQ ID NO: 3084 - DNA, 21 bp, synthetic construct
  source 1..21: mol_type = other DNA
caccctgtcccgggtgcctgg

SEQ ID NO: 3085 - DNA, 21 bp, synthetic construct
  source 1..21: mol_type = other DNA
caccctgtcccgggtgcctgg

SEQ ID NO: 3086 - DNA, 21 bp, synthetic construct
  source 1..21: mol_type = other DNA
caccctgtcccgggtgcctgg

SEQ ID NO: 3087 - DNA, 21 bp, synthetic construct
  source 1..21: mol_type = other DNA
ccaccctgtcccgggtgcctg

SEQ ID NO: 3088 - DNA, 21 bp, synthetic construct
  source 1..21: mol_type = other DNA
ccaccctgtcccgggtgcctg

SEQ ID NO: 3089 - DNA, 21 bp, synthetic construct
  source 1..21: mol_type = other DNA
ccaccctgtcccgggtgcctg

SEQ ID NO: 3090 - DNA, 21 bp, synthetic construct
  source 1..21: mol_type = other DNA
ccaccctgtcccgggtgcctg

SEQ ID NO: 3091 - DNA, 21 bp, synthetic construct
  source 1..21: mol_type = other DNA
ccaccctgtcccgggtgcctg

SEQ ID NO: 3092 - DNA, 21 bp, synthetic construct
  source 1..21: mol_type = other DNA
ccaccctgtcccgggtgcctg

SEQ ID NO: 3093 - DNA, 21 bp, synthetic construct
  source 1..21: mol_type = other DNA
ccaccctgtcccgggtgcctg

SEQ ID NO: 3094 - DNA, 21 bp, synthetic construct
  source 1..21: mol_type = other DNA
ccaccctgtcccgggtgcctg

SEQ ID NO: 3095 - DNA, 21 bp, synthetic construct
  source 1..21: mol_type = other DNA
gccaccctgtcccgggtgcct

SEQ ID NO: 3096 - DNA, 21 bp, synthetic construct
  source 1..21: mol_type = other DNA
gccaccctgtcccgggtgcct

SEQ ID NO: 3097 - DNA, 21 bp, synthetic construct
  source 1..21: mol_type = other DNA
gccaccctgtcccgggtgcct

SEQ ID NO: 3098 - DNA, 21 bp, synthetic construct
  source 1..21: mol_type = other DNA
gccaccctgtcccgggtgcct

SEQ ID NO: 3099 - DNA, 21 bp, synthetic construct
  source 1..21: mol_type = other DNA
gccaccctgtcccgggtgcct

SEQ ID NO: 3100 - DNA, 21 bp, synthetic construct
  source 1..21: mol_type = other DNA
gccaccctgtcccgggtgcct

SEQ ID NO: 3101 - DNA, 21 bp, synthetic construct
  source 1..21: mol_type = other DNA
gccaccctgtcccgggtgcct

SEQ ID NO: 3102 - DNA, 21 bp, synthetic construct
  source 1..21: mol_type = other DNA
gccaccctgtcccgggtgcct

SEQ ID NO: 3103 - DNA, 21 bp, synthetic construct
  source 1..21: mol_type = other DNA
tgccaccctgtcccgggtgcc

SEQ ID NO: 3104 - DNA, 21 bp, synthetic construct
  source 1..21: mol_type = other DNA
tgccaccctgtcccgggtgcc

SEQ ID NO: 3105 - DNA, 21 bp, synthetic construct
  source 1..21: mol_type = other DNA
tgccaccctgtcccgggtgcc

SEQ ID NO: 3106 - DNA, 21 bp, synthetic construct
  source 1..21: mol_type = other DNA
tgccaccctgtcccgggtgcc

SEQ ID NO: 3107 - DNA, 21 bp, synthetic construct
  source 1..21: mol_type = other DNA
tgccaccctgtcccgggtgcc

SEQ ID NO: 3108 - DNA, 21 bp, synthetic construct
  source 1..21: mol_type = other DNA
tgccaccctgtcccgggtgcc

SEQ ID NO: 3109 - DNA, 21 bp, synthetic construct
  source 1..21: mol_type = other DNA
tgccaccctgtcccgggtgcc

SEQ ID NO: 3110 - DNA, 21 bp, synthetic construct
  source 1..21: mol_type = other DNA
tgccaccctgtcccgggtgcc

SEQ ID NO: 3111 - DNA, 21 bp, synthetic construct
  source 1..21: mol_type = other DNA
ctgccaccctgtcccgggtgc

SEQ ID NO: 3112 - DNA, 21 bp, synthetic construct
  source 1..21: mol_type = other DNA
ctgccaccctgtcccgggtgc

SEQ ID NO: 3113 - DNA, 21 bp, synthetic construct
  source 1..21: mol_type = other DNA
ctgccaccctgtcccgggtgc

SEQ ID NO: 3114 - DNA, 21 bp, synthetic construct
  source 1..21: mol_type = other DNA
ctgccaccctgtcccgggtgc

SEQ ID NO: 3115 - DNA, 21 bp, synthetic construct
  source 1..21: mol_type = other DNA
ctgccaccctgtcccgggtgc

SEQ ID NO: 3116 - DNA, 21 bp, synthetic construct
  source 1..21: mol_type = other DNA
ctgccaccctgtcccgggtgc

SEQ ID NO: 3117 - DNA, 21 bp, synthetic construct
  source 1..21: mol_type = other DNA
ctgccaccctgtcccgggtgc

SEQ ID NO: 3118 - DNA, 21 bp, synthetic construct
  source 1..21: mol_type = other DNA
ctgccaccctgtcccgggtgc

SEQ ID NO: 3119 - DNA, 21 bp, synthetic construct
  source 1..21: mol_type = other DNA
cctgccaccctgtcccgggtg

SEQ ID NO: 3120 - DNA, 21 bp, synthetic construct
  source 1..21: mol_type = other DNA
cctgccaccctgtcccgggtg

SEQ ID NO: 3121 - DNA, 21 bp, synthetic construct
  source 1..21: mol_type = other DNA
cctgccaccctgtcccgggtg

SEQ ID NO: 3122 - DNA, 21 bp, synthetic construct
  source 1..21: mol_type = other DNA
cctgccaccctgtcccgggtg

SEQ ID NO: 3123 - DNA, 21 bp, synthetic construct
  source 1..21: mol_type = other DNA
cctgccaccctgtcccgggtg

SEQ ID NO: 3124 - DNA, 21 bp, synthetic construct
  source 1..21: mol_type = other DNA
cctgccaccctgtcccgggtg

SEQ ID NO: 3125 - DNA, 21 bp, synthetic construct
  source 1..21: mol_type = other DNA
cctgccaccctgtcccgggtg

SEQ ID NO: 3126 - DNA, 21 bp, synthetic construct
  source 1..21: mol_type = other DNA
cctgccaccctgtcccgggtg

SEQ ID NO: 3127 - DNA, 21 bp, synthetic construct
  source 1..21: mol_type = other DNA
gccctgccaccctgtcccggg

SEQ ID NO: 3128 - DNA, 21 bp, synthetic construct
  source 1..21: mol_type = other DNA
gccctgccaccctgtcccggg

SEQ ID NO: 3129 - DNA, 21 bp, synthetic construct
  source 1..21: mol_type = other DNA
gccctgccaccctgtcccggg

SEQ ID NO: 3130 - DNA, 21 bp, synthetic construct
  source 1..21: mol_type = other DNA
gccctgccaccctgtcccggg

SEQ ID NO: 3131 - DNA, 21 bp, synthetic construct
  source 1..21: mol_type = other DNA
gccctgccaccctgtcccggg

SEQ ID NO: 3132 - DNA, 21 bp, synthetic construct
  source 1..21: mol_type = other DNA
gccctgccaccctgtcccggg

SEQ ID NO: 3133 - DNA, 21 bp, synthetic construct
  source 1..21: mol_type = other DNA
gccctgccaccctgtcccggg

SEQ ID NO: 3134 - DNA, 21 bp, synthetic construct
  source 1..21: mol_type = other DNA
gccctgccaccctgtcccggg

SEQ ID NO: 3135 - DNA, 21 bp, synthetic construct
  source 1..21: mol_type = other DNA
cgccctgccaccctgtcccgg

SEQ ID NO: 3136 - DNA, 21 bp, synthetic construct
  source 1..21: mol_type = other DNA
cgccctgccaccctgtcccgg

SEQ ID NO: 3137 - DNA, 21 bp, synthetic construct
  source 1..21: mol_type = other DNA
cgccctgccaccctgtcccgg

SEQ ID NO: 3138 - DNA, 21 bp, synthetic construct
  source 1..21: mol_type = other DNA
cgccctgccaccctgtcccgg

SEQ ID NO: 3139 - DNA, 21 bp, synthetic construct
  source 1..21: mol_type = other DNA
cgccctgccaccctgtcccgg

SEQ ID NO: 3140 - DNA, 21 bp, synthetic construct
  source 1..21: mol_type = other DNA
cgccctgccaccctgtcccgg

SEQ ID NO: 3141 - DNA, 21 bp, synthetic construct
  source 1..21: mol_type = other DNA
cgccctgccaccctgtcccgg

SEQ ID NO: 3142 - DNA, 21 bp, synthetic construct
  source 1..21: mol_type = other DNA
cgccctgccaccctgtcccgg

SEQ ID NO: 3143 - DNA, 21 bp, synthetic construct
  source 1..21: mol_type = other DNA
gcgccctgccaccctgtcccg

SEQ ID NO: 3144 - DNA, 21 bp, synthetic construct
  source 1..21: mol_type = other DNA
gcgccctgccaccctgtcccg

SEQ ID NO: 3145 - DNA, 21 bp, synthetic construct
  source 1..21: mol_type = other DNA
gcgccctgccaccctgtcccg

SEQ ID NO: 3146 - DNA, 21 bp, synthetic construct
  source 1..21: mol_type = other DNA
gcgccctgccaccctgtcccg

SEQ ID NO: 3147 - DNA, 21 bp, synthetic construct
  source 1..21: mol_type = other DNA
gcgccctgccaccctgtcccg

SEQ ID NO: 3148 - DNA, 21 bp, synthetic construct
  source 1..21: mol_type = other DNA
gcgccctgccaccctgtcccg

SEQ ID NO: 3149 - DNA, 21 bp, synthetic construct
  source 1..21: mol_type = other DNA
gcgccctgccaccctgtcccg

SEQ ID NO: 3150 - DNA, 21 bp, synthetic construct
  source 1..21: mol_type = other DNA
gcgccctgccaccctgtcccg

SEQ ID NO: 3151 - DNA, 21 bp, synthetic construct
  source 1..21: mol_type = other DNA
ggcgccctgccaccctgtccc

SEQ ID NO: 3152 - DNA, 21 bp, synthetic construct
  source 1..21: mol_type = other DNA
ggcgccctgccaccctgtccc

SEQ ID NO: 3153 - DNA, 21 bp, synthetic construct
  source 1..21: mol_type = other DNA
ggcgccctgccaccctgtccc

SEQ ID NO: 3154 - DNA, 21 bp, synthetic construct
  source 1..21: mol_type = other DNA
ggcgccctgccaccctgtccc

SEQ ID NO: 3155 - DNA, 21 bp, synthetic construct
  source 1..21: mol_type = other DNA
ggcgccctgccaccctgtccc

SEQ ID NO: 3156 - DNA, 21 bp, synthetic construct
  source 1..21: mol_type = other DNA
ggcgccctgccaccctgtccc

SEQ ID NO: 3157 - DNA, 21 bp, synthetic construct
  source 1..21: mol_type = other DNA
ggcgccctgccaccctgtccc

SEQ ID NO: 3158 - DNA, 21 bp, synthetic construct
  source 1..21: mol_type = other DNA
ggcgccctgccaccctgtccc

SEQ ID NO: 3159 - DNA, 21 bp, synthetic construct
  source 1..21: mol_type = other DNA
ttcgattctgaaaccagatct

SEQ ID NO: 3160 - DNA, 21 bp, synthetic construct
  source 1..21: mol_type = other DNA
aagcccggacaagaggacggc

SEQ ID NO: 3161 - DNA, 21 bp, synthetic construct
  source 1..21: mol_type = other DNA
aagcccggttaagaggacggc

SEQ ID NO: 3162 - DNA, 21 bp, synthetic construct
  source 1..21: mol_type = other DNA
aagcccggtaaggaggacggc

SEQ ID NO: 3163 - DNA, 21 bp, synthetic construct
  source 1..21: mol_type = other DNA
aagcccggcaaggaggacggc

SEQ ID NO: 3164 - DNA, 21 bp, synthetic construct
  source 1..21: mol_type = other DNA
aagcccggataggaggacggc

SEQ ID NO: 3165 - DNA, 21 bp, synthetic construct
  source 1..21: mol_type = other DNA
aagcccggctaggaggacggc

SEQ ID NO: 3166 - DNA, 21 bp, synthetic construct
  source 1..21: mol_type = other DNA
aagcccggacaggaggacggc

SEQ ID NO: 3167 - DNA, 21 bp, synthetic construct
  source 1..21: mol_type = other DNA
aagcccggtcaggaggacggc

SEQ ID NO: 3168 - DNA, 21 bp, synthetic construct
  source 1..21: mol_type = other DNA
accccgagaaatagcgaggcc

SEQ ID NO: 3169 - DNA, 21 bp, synthetic construct
  source 1..21: mol_type = other DNA
accccgaggaatagcgaggcc

SEQ ID NO: 3170 - DNA, 21 bp, synthetic construct
  source 1..21: mol_type = other DNA
accccgagagatagcgaggcc

SEQ ID NO: 3171 - DNA, 21 bp, synthetic construct
  source 1..21: mol_type = other DNA
accccgagggatagcgaggcc

SEQ ID NO: 3172 - DNA, 21 bp, synthetic construct
  source 1..21: mol_type = other DNA
accccgagaaacagcgaggcc

SEQ ID NO: 3173 - DNA, 21 bp, synthetic construct
  source 1..21: mol_type = other DNA
accccgaggaacagcgaggcc

SEQ ID NO: 3174 - DNA, 21 bp, synthetic construct
  source 1..21: mol_type = other DNA
accccgagagacagcgaggcc

SEQ ID NO: 3175 - DNA, 21 bp, synthetic construct
  source 1..21: mol_type = other DNA
accccgagggacagcgaggcc

SEQ ID NO: 3176 - DNA, 21 bp, synthetic construct
  source 1..21: mol_type = other DNA
ccgagccattgagaggccctg

SEQ ID NO: 3177 - DNA, 21 bp, synthetic construct
  source 1..21: mol_type = other DNA
ccgagccactgagaggccctg

SEQ ID NO: 3178 - DNA, 21 bp, synthetic construct
  source 1..21: mol_type = other DNA
ccgagccatcgagaggccctg

SEQ ID NO: 3179 - DNA, 21 bp, synthetic construct
  source 1..21: mol_type = other DNA
ccgagccaccgagaggccctg

SEQ ID NO: 3180 - DNA, 21 bp, synthetic construct
  source 1..21: mol_type = other DNA
ccgagccattgggaggccctg

SEQ ID NO: 3181 - DNA, 21 bp, synthetic construct
  source 1..21: mol_type = other DNA
ccgagccactgggaggccctg

SEQ ID NO: 3182 - DNA, 21 bp, synthetic construct
  source 1..21: mol_type = other DNA
ccgagccatcgggaggccctg

SEQ ID NO: 3183 - DNA, 21 bp, synthetic construct
  source 1..21: mol_type = other DNA
ccgagccaccgggaggccctg

SEQ ID NO: 3184 - DNA, 21 bp, synthetic construct
  source 1..21: mol_type = other DNA
gacgcggcgggacagaaggcc

SEQ ID NO: 3185 - DNA, 21 bp, synthetic construct
  source 1..21: mol_type = other DNA
gacgcggcaagacagaaggcc

SEQ ID NO: 3186 - DNA, 21 bp, synthetic construct
  source 1..21: mol_type = other DNA
gacgcggcgagacagaaggcc

SEQ ID NO: 3187 - DNA, 21 bp, synthetic construct
  source 1..21: mol_type = other DNA
gacgcggcaggacagaaggcc

SEQ ID NO: 3188 - DNA, 21 bp, synthetic construct
  source 1..21: mol_type = other DNA
gacgcggcaaggcagaaggcc

SEQ ID NO: 3189 - DNA, 21 bp, synthetic construct
  source 1..21: mol_type = other DNA
gacgcggcgaggcagaaggcc

SEQ ID NO: 3190 - DNA, 21 bp, synthetic construct
  source 1..21: mol_type = other DNA
gacgcggcagggcagaaggcc

SEQ ID NO: 3191 - DNA, 21 bp, synthetic construct
  source 1..21: mol_type = other DNA
gacgcggcggggcagaaggcc

SEQ ID NO: 3192 - DNA, 21 bp, synthetic construct
  source 1..21: mol_type = other DNA
catcgccgagccggaggagct

SEQ ID NO: 3193 - DNA, 21 bp, synthetic construct
  source 1..21: mol_type = other DNA
catcgccggacaggaggagct

SEQ ID NO: 3194 - DNA, 21 bp, synthetic construct
  source 1..21: mol_type = other DNA
catcgccgggcaggaggagct

SEQ ID NO: 3195 - DNA, 21 bp, synthetic construct
  source 1..21: mol_type = other DNA
catcgccgaactggaggagct

SEQ ID NO: 3196 - DNA, 21 bp, synthetic construct
  source 1..21: mol_type = other DNA
catcgccggactggaggagct

SEQ ID NO: 3197 - DNA, 21 bp, synthetic construct
  source 1..21: mol_type = other DNA
catcgccgggctggaggagct

SEQ ID NO: 3198 - DNA, 21 bp, synthetic construct
  source 1..21: mol_type = other DNA
catcgccgaaccggaggagct

SEQ ID NO: 3199 - DNA, 21 bp, synthetic construct
  source 1..21: mol_type = other DNA
catcgccggaccggaggagct

SEQ ID NO: 3200 - DNA, 21 bp, synthetic construct
  source 1..21: mol_type = other DNA
gcccgcgcctgaaggcggcct

SEQ ID NO: 3201 - DNA, 21 bp, synthetic construct
  source 1..21: mol_type = other DNA
gcccgcgctagaaggcggcct

SEQ ID NO: 3202 - DNA, 21 bp, synthetic construct
  source 1..21: mol_type = other DNA
gcccgcgccagaaggcggcct

SEQ ID NO: 3203 - DNA, 21 bp, synthetic construct
  source 1..21: mol_type = other DNA
gcccgcgcccgaaggcggcct

SEQ ID NO: 3204 - DNA, 21 bp, synthetic construct
  source 1..21: mol_type = other DNA
gcccgcgcttggaggcggcct

SEQ ID NO: 3205 - DNA, 21 bp, synthetic construct
  source 1..21: mol_type = other DNA
gcccgcgcctggaggcggcct

SEQ ID NO: 3206 - DNA, 21 bp, synthetic construct
  source 1..21: mol_type = other DNA
gcccgcgctcggaggcggcct

SEQ ID NO: 3207 - DNA, 21 bp, synthetic construct
  source 1..21: mol_type = other DNA
gcccgcgcccggaggcggcct

SEQ ID NO: 3208 - DNA, 21 bp, synthetic construct
  source 1..21: mol_type = other DNA
cctgtgcaaggaggcccccgg

SEQ ID NO: 3209 - DNA, 21 bp, synthetic construct
  source 1..21: mol_type = other DNA
cctgtgcatagaggcccccgg

SEQ ID NO: 3210 - DNA, 21 bp, synthetic construct
  source 1..21: mol_type = other DNA
cctgtgcacagaggcccccgg

SEQ ID NO: 3211 - DNA, 21 bp, synthetic construct
  source 1..21: mol_type = other DNA
cctgtgcatggaggcccccgg

SEQ ID NO: 3212 - DNA, 21 bp, synthetic construct
  source 1..21: mol_type = other DNA
cctgtgcacggaggcccccgg

SEQ ID NO: 3213 - DNA, 21 bp, synthetic construct
  source 1..21: mol_type = other DNA
cctgtgcaaaggggcccccgg

SEQ ID NO: 3214 - DNA, 21 bp, synthetic construct
  source 1..21: mol_type = other DNA
cctgtgcataggggcccccgg

SEQ ID NO: 3215 - DNA, 21 bp, synthetic construct
  source 1..21: mol_type = other DNA
cctgtgcaagggggcccccgg

SEQ ID NO: 3216 - DNA, 21 bp, synthetic construct
  source 1..21: mol_type = other DNA
gggggtcagacggctccctcg

SEQ ID NO: 3217 - DNA, 21 bp, synthetic construct
  source 1..21: mol_type = other DNA
gggggtcaaacagctccctcg

SEQ ID NO: 3218 - DNA, 21 bp, synthetic construct
  source 1..21: mol_type = other DNA
gggggtcaggcagctccctcg

SEQ ID NO: 3219 - DNA, 21 bp, synthetic construct
  source 1..21: mol_type = other DNA
gggggtcaaaccgctccctcg

SEQ ID NO: 3220 - DNA, 21 bp, synthetic construct
  source 1..21: mol_type = other DNA
gggggtcagaccgctccctcg

SEQ ID NO: 3221 - DNA, 21 bp, synthetic construct
  source 1..21: mol_type = other DNA
gggggtcaggccgctccctcg

SEQ ID NO: 3222 - DNA, 21 bp, synthetic construct
  source 1..21: mol_type = other DNA
gggggtcaagcggctccctcg

SEQ ID NO: 3223 - DNA, 21 bp, synthetic construct
  source 1..21: mol_type = other DNA
gggggtcaggcggctccctcg

SEQ ID NO: 3224 - DNA, 21 bp, synthetic construct
  source 1..21: mol_type = other DNA
ctcgtgggggggcttcgccca

SEQ ID NO: 3225 - DNA, 21 bp, synthetic construct
  source 1..21: mol_type = other DNA
ctcgtgggaagacttcgccca

SEQ ID NO: 3226 - DNA, 21 bp, synthetic construct
  source 1..21: mol_type = other DNA
ctcgtgggcagacttcgccca

SEQ ID NO: 3227 - DNA, 21 bp, synthetic construct
  source 1..21: mol_type = other DNA
ctcgtgggaggacttcgccca

SEQ ID NO: 3228 - DNA, 21 bp, synthetic construct
  source 1..21: mol_type = other DNA
ctcgtgggcggacttcgccca

SEQ ID NO: 3229 - DNA, 21 bp, synthetic construct
  source 1..21: mol_type = other DNA
ctcgtggggggacttcgccca

SEQ ID NO: 3230 - DNA, 21 bp, synthetic construct
  source 1..21: mol_type = other DNA
ctcgtggggaggcttcgccca

SEQ ID NO: 3231 - DNA, 21 bp, synthetic construct
  source 1..21: mol_type = other DNA
ctcgtgggagggcttcgccca

SEQ ID NO: 3232 - DNA, 21 bp, synthetic construct
  source 1..21: mol_type = other DNA
ggtcgcctaggaccacaccgg

SEQ ID NO: 3233 - DNA, 21 bp, synthetic construct
  source 1..21: mol_type = other DNA
ggtcgcctcagaccacaccgg

SEQ ID NO: 3234 - DNA, 21 bp, synthetic construct
  source 1..21: mol_type = other DNA
ggtcgcctgagaccacaccgg

SEQ ID NO: 3235 - DNA, 21 bp, synthetic construct
  source 1..21: mol_type = other DNA
ggtcgcctcggaccacaccgg

SEQ ID NO: 3236 - DNA, 21 bp, synthetic construct
  source 1..21: mol_type = other DNA
ggtcgcctaaggccacaccgg

SEQ ID NO: 3237 - DNA, 21 bp, synthetic construct
  source 1..21: mol_type = other DNA
ggtcgcctcaggccacaccgg

SEQ ID NO: 3238 - DNA, 21 bp, synthetic construct
  source 1..21: mol_type = other DNA
ggtcgcctgaggccacaccgg

SEQ ID NO: 3239 - DNA, 21 bp, synthetic construct
  source 1..21: mol_type = other DNA
ggtcgcctggggccacaccgg

SEQ ID NO: 3240 - DNA, 21 bp, synthetic construct
  source 1..21: mol_type = other DNA
tcgccttcaacgacaccggcg

SEQ ID NO: 3241 - DNA, 21 bp, synthetic construct
  source 1..21: mol_type = other DNA
tcgccttctgcgacaccggcg

SEQ ID NO: 3242 - DNA, 21 bp, synthetic construct
  source 1..21: mol_type = other DNA
tcgccttcaacaacaccggcg

SEQ ID NO: 3243 - DNA, 21 bp, synthetic construct
  source 1..21: mol_type = other DNA
tcgccttccacaacaccggcg

SEQ ID NO: 3244 - DNA, 21 bp, synthetic construct
  source 1..21: mol_type = other DNA
tcgccttcagcaacaccggcg

SEQ ID NO: 3245 - DNA, 21 bp, synthetic construct
  source 1..21: mol_type = other DNA
tcgccttctgcaacaccggcg

SEQ ID NO: 3246 - DNA, 21 bp, synthetic construct
  source 1..21: mol_type = other DNA
tcgccttccgcaacaccggcg

SEQ ID NO: 3247 - DNA, 21 bp, synthetic construct
  source 1..21: mol_type = other DNA
tcgccttctacgacaccggcg

SEQ ID NO: 3248 - DNA, 21 bp, synthetic construct
  source 1..21: mol_type = other DNA
cggcgcgtatgtaacggggct

SEQ ID NO: 3249 - DNA, 21 bp, synthetic construct
  source 1..21: mol_type = other DNA
cggcgcgtaagaaacggggct

SEQ ID NO: 3250 - DNA, 21 bp, synthetic construct
  source 1..21: mol_type = other DNA
cggcgcgtctgaaacggggct

SEQ ID NO: 3251 - DNA, 21 bp, synthetic construct
  source 1..21: mol_type = other DNA
cggcgcgtaagtaacggggct

SEQ ID NO: 3252 - DNA, 21 bp, synthetic construct
  source 1..21: mol_type = other DNA
cggcgcgtttgtaacggggct

SEQ ID NO: 3253 - DNA, 21 bp, synthetic construct
  source 1..21: mol_type = other DNA
cggcgcgtaagcaacggggct

SEQ ID NO: 3254 - DNA, 21 bp, synthetic construct
  source 1..21: mol_type = other DNA
cggcgcgtatgcaacggggct

SEQ ID NO: 3255 - DNA, 21 bp, synthetic construct
  source 1..21: mol_type = other DNA
cggcgcgtctgcaacggggct

SEQ ID NO: 3256 - DNA, 21 bp, synthetic construct
  source 1..21: mol_type = other DNA
cgccccggggcatccggacgg

SEQ ID NO: 3257 - DNA, 21 bp, synthetic construct
  source 1..21: mol_type = other DNA
cgccccggaacatccggacgg

SEQ ID NO: 3258 - DNA, 21 bp, synthetic construct
  source 1..21: mol_type = other DNA
cgccccgggacatccggacgg

SEQ ID NO: 3259 - DNA, 21 bp, synthetic construct
  source 1..21: mol_type = other DNA
cgccccggaccatccggacgg

SEQ ID NO: 3260 - DNA, 21 bp, synthetic construct
  source 1..21: mol_type = other DNA
cgccccggaacgtccggacgg

SEQ ID NO: 3261 - DNA, 21 bp, synthetic construct
  source 1..21: mol_type = other DNA
cgccccgggacgtccggacgg

SEQ ID NO: 3262 - DNA, 21 bp, synthetic construct
  source 1..21: mol_type = other DNA
cgccccgggccgtccggacgg

SEQ ID NO: 3263 - DNA, 21 bp, synthetic construct
  source 1..21: mol_type = other DNA
cgccccggggcgtccggacgg

SEQ ID NO: 3264 - DNA, 21 bp, synthetic construct
  source 1..21: mol_type = other DNA
ctcctccgtcctgggcgctct

SEQ ID NO: 3265 - DNA, 21 bp, synthetic construct
  source 1..21: mol_type = other DNA
ctcctccgatcagggcgctct

SEQ ID NO: 3266 - DNA, 21 bp, synthetic construct
  source 1..21: mol_type = other DNA
ctcctccgttctgggcgctct

SEQ ID NO: 3267 - DNA, 21 bp, synthetic construct
  source 1..21: mol_type = other DNA
ctcctccgctctgggcgctct

SEQ ID NO: 3268 - DNA, 21 bp, synthetic construct
  source 1..21: mol_type = other DNA
ctcctccgacctgggcgctct

SEQ ID NO: 3269 - DNA, 21 bp, synthetic construct
  source 1..21: mol_type = other DNA
ctcctccgatccgggcgctct

SEQ ID NO: 3270 - DNA, 21 bp, synthetic construct
  source 1..21: mol_type = other DNA
ctcctccgttccgggcgctct

SEQ ID NO: 3271 - DNA, 21 bp, synthetic construct
  source 1..21: mol_type = other DNA
ctcctccgtcccgggcgctct

SEQ ID NO: 3272 - DNA, 21 bp, synthetic construct
  source 1..21: mol_type = other DNA
ctccccaggacacgcccccgg

SEQ ID NO: 3273 - DNA, 21 bp, synthetic construct
  source 1..21: mol_type = other DNA
ctccccagagcacgcccccgg

SEQ ID NO: 3274 - DNA, 21 bp, synthetic construct
  source 1..21: mol_type = other DNA
ctccccagggcacgcccccgg

SEQ ID NO: 3275 - DNA, 21 bp, synthetic construct
  source 1..21: mol_type = other DNA
ctccccagaactcgcccccgg

SEQ ID NO: 3276 - DNA, 21 bp, synthetic construct
  source 1..21: mol_type = other DNA
ctccccagggctcgcccccgg

SEQ ID NO: 3277 - DNA, 21 bp, synthetic construct
  source 1..21: mol_type = other DNA
ctccccagaacccgcccccgg

SEQ ID NO: 3278 - DNA, 21 bp, synthetic construct
  source 1..21: mol_type = other DNA
ctccccaggacccgcccccgg

SEQ ID NO: 3279 - DNA, 21 bp, synthetic construct
  source 1..21: mol_type = other DNA
ctccccagggcccgcccccgg

SEQ ID NO: 3280 - DNA, 21 bp, synthetic construct
  source 1..21: mol_type = other DNA
gcgcccccccaggcctccgcc

SEQ ID NO: 3281 - DNA, 21 bp, synthetic construct
  source 1..21: mol_type = other DNA
gcgcccccataagcctccgcc

SEQ ID NO: 3282 - DNA, 21 bp, synthetic construct
  source 1..21: mol_type = other DNA
gcgcccccctaagcctccgcc

SEQ ID NO: 3283 - DNA, 21 bp, synthetic construct
  source 1..21: mol_type = other DNA
gcgcccccacaagcctccgcc

SEQ ID NO: 3284 - DNA, 21 bp, synthetic construct
  source 1..21: mol_type = other DNA
gcgccccctcaagcctccgcc

SEQ ID NO: 3285 - DNA, 21 bp, synthetic construct
  source 1..21: mol_type = other DNA
gcgccccccaaggcctccgcc

SEQ ID NO: 3286 - DNA, 21 bp, synthetic construct
  source 1..21: mol_type = other DNA
gcgcccccataggcctccgcc

SEQ ID NO: 3287 - DNA, 21 bp, synthetic construct
  source 1..21: mol_type = other DNA
gcgcccccacaggcctccgcc

SEQ ID NO: 3288 - DNA, 21 bp, synthetic construct
  source 1..21: mol_type = other DNA
gagctttataaggcggggtct

SEQ ID NO: 3289 - DNA, 21 bp, synthetic construct
  source 1..21: mol_type = other DNA
gagctttataaagcggggtct

SEQ ID NO: 3290 - DNA, 21 bp, synthetic construct
  source 1..21: mol_type = other DNA
gagctttaataagcggggtct

SEQ ID NO: 3291 - DNA, 21 bp, synthetic construct
  source 1..21: mol_type = other DNA
gagctttactaagcggggtct

SEQ ID NO: 3292 - DNA, 21 bp, synthetic construct
  source 1..21: mol_type = other DNA
gagctttatcaagcggggtct

SEQ ID NO: 3293 - DNA, 21 bp, synthetic construct
  source 1..21: mol_type = other DNA
gagctttaataggcggggtct

SEQ ID NO: 3294 - DNA, 21 bp, synthetic construct
  source 1..21: mol_type = other DNA
gagctttattaggcggggtct

SEQ ID NO: 3295 - DNA, 21 bp, synthetic construct
  source 1..21: mol_type = other DNA
gagctttatcaggcggggtct

SEQ ID NO: 3296 - DNA, 21 bp, synthetic construct
  source 1..21: mol_type = other DNA
taggacgccagatctaggccc

SEQ ID NO: 3297 - DNA, 21 bp, synthetic construct
  source 1..21: mol_type = other DNA
taggacgcatgttctaggccc

SEQ ID NO: 3298 - DNA, 21 bp, synthetic construct
  source 1..21: mol_type = other DNA
taggacgcttgttctaggccc

SEQ ID NO: 3299 - DNA, 21 bp, synthetic construct
  source 1..21: mol_type = other DNA
taggacgcctgttctaggccc

SEQ ID NO: 3300 - DNA, 21 bp, synthetic construct
  source 1..21: mol_type = other DNA
taggacgctcgttctaggccc

SEQ ID NO: 3301 - DNA, 21 bp, synthetic construct
  source 1..21: mol_type = other DNA
taggacgcaagctctaggccc

SEQ ID NO: 3302 - DNA, 21 bp, synthetic construct
  source 1..21: mol_type = other DNA
taggacgcctgctctaggccc

SEQ ID NO: 3303 - DNA, 21 bp, synthetic construct
  source 1..21: mol_type = other DNA
taggacgcccgctctaggccc

SEQ ID NO: 3304 - DNA, 21 bp, synthetic construct
  source 1..21: mol_type = other DNA
acagggggggtccgtgagcca

SEQ ID NO: 3305 - DNA, 21 bp, synthetic construct
  source 1..21: mol_type = other DNA
acagggggactacgtgagcca

SEQ ID NO: 3306 - DNA, 21 bp, synthetic construct
  source 1..21: mol_type = other DNA
acagggggagtacgtgagcca

SEQ ID NO: 3307 - DNA, 21 bp, synthetic construct
  source 1..21: mol_type = other DNA
acagggggaatccgtgagcca

SEQ ID NO: 3308 - DNA, 21 bp, synthetic construct
  source 1..21: mol_type = other DNA
acagggggactccgtgagcca

SEQ ID NO: 3309 - DNA, 21 bp, synthetic construct
  source 1..21: mol_type = other DNA
acaggggggctccgtgagcca

SEQ ID NO: 3310 - DNA, 21 bp, synthetic construct
  source 1..21: mol_type = other DNA
acaggggggatgcgtgagcca

SEQ ID NO: 3311 - DNA, 21 bp, synthetic construct
  source 1..21: mol_type = other DNA
acagggggactgcgtgagcca

SEQ ID NO: 3312 - DNA, 21 bp, synthetic construct
  source 1..21: mol_type = other DNA
ggggctttaattagccaggca

SEQ ID NO: 3313 - DNA, 21 bp, synthetic construct
  source 1..21: mol_type = other DNA
ggggctttgataagccaggca

SEQ ID NO: 3314 - DNA, 21 bp, synthetic construct
  source 1..21: mol_type = other DNA
ggggctttgttaagccaggca

SEQ ID NO: 3315 - DNA, 21 bp, synthetic construct
  source 1..21: mol_type = other DNA
ggggctttactaagccaggca

SEQ ID NO: 3316 - DNA, 21 bp, synthetic construct
  source 1..21: mol_type = other DNA
ggggctttatttagccaggca

SEQ ID NO: 3317 - DNA, 21 bp, synthetic construct
  source 1..21: mol_type = other DNA
ggggctttgcttagccaggca

SEQ ID NO: 3318 - DNA, 21 bp, synthetic construct
  source 1..21: mol_type = other DNA
ggggctttgatcagccaggca

SEQ ID NO: 3319 - DNA, 21 bp, synthetic construct
  source 1..21: mol_type = other DNA
ggggctttgctcagccaggca

SEQ ID NO: 3320 - DNA, 21 bp, synthetic construct
  source 1..21: mol_type = other DNA
ctttcgtgttcaaggcagcga

SEQ ID NO: 3321 - DNA, 21 bp, synthetic construct
  source 1..21: mol_type = other DNA
ctttcgtgttcgaggcagcga

SEQ ID NO: 3322 - DNA, 21 bp, synthetic construct
  source 1..21: mol_type = other DNA
ctttcgtgtccaaggcagcga

SEQ ID NO: 3323 - DNA, 21 bp, synthetic construct
  source 1..21: mol_type = other DNA
ctttcgtgtacgaggcagcga

SEQ ID NO: 3324 - DNA, 21 bp, synthetic construct
  source 1..21: mol_type = other DNA
ctttcgtgcacgaggcagcga

SEQ ID NO: 3325 - DNA, 21 bp, synthetic construct
  source 1..21: mol_type = other DNA
ctttcgtgctcgaggcagcga

SEQ ID NO: 3326 - DNA, 21 bp, synthetic construct
  source 1..21: mol_type = other DNA
ctttcgtgtccgaggcagcga

SEQ ID NO: 3327 - DNA, 21 bp, synthetic construct
  source 1..21: mol_type = other DNA
ctttcgtgcccgaggcagcga

SEQ ID NO: 3328 - DNA, 21 bp, synthetic construct
  source 1..21: mol_type = other DNA
ccgcccccaggatgcagccca

SEQ ID NO: 3329 - DNA, 21 bp, synthetic construct
  source 1..21: mol_type = other DNA
ccgcccccaagatgcagccca

SEQ ID NO: 3330 - DNA, 21 bp, synthetic construct
  source 1..21: mol_type = other DNA
ccgccccctggatgcagccca

SEQ ID NO: 3331 - DNA, 21 bp, synthetic construct
  source 1..21: mol_type = other DNA
ccgccccccggatgcagccca

SEQ ID NO: 3332 - DNA, 21 bp, synthetic construct
  source 1..21: mol_type = other DNA
ccgccccctaggtgcagccca

SEQ ID NO: 3333 - DNA, 21 bp, synthetic construct
  source 1..21: mol_type = other DNA
ccgccccccaggtgcagccca

SEQ ID NO: 3334 - DNA, 21 bp, synthetic construct
  source 1..21: mol_type = other DNA
ccgccccctgggtgcagccca

SEQ ID NO: 3335 - DNA, 21 bp, synthetic construct
  source 1..21: mol_type = other DNA
ccgccccccgggtgcagccca

SEQ ID NO: 3336 - DNA, 21 bp, synthetic construct
  source 1..21: mol_type = other DNA
atctcccatgccgccccggcg

SEQ ID NO: 3337 - DNA, 21 bp, synthetic construct
  source 1..21: mol_type = other DNA
atctcccatacagccccggcg

SEQ ID NO: 3338 - DNA, 21 bp, synthetic construct
  source 1..21: mol_type = other DNA
atctcccacacagccccggcg

SEQ ID NO: 3339 - DNA, 21 bp, synthetic construct
  source 1..21: mol_type = other DNA
atctcccatgcagccccggcg

SEQ ID NO: 3340 - DNA, 21 bp, synthetic construct
  source 1..21: mol_type = other DNA
atctcccacgcagccccggcg

SEQ ID NO: 3341 - DNA, 21 bp, synthetic construct
  source 1..21: mol_type = other DNA
atctcccataccgccccggcg

SEQ ID NO: 3342 - DNA, 21 bp, synthetic construct
  source 1..21: mol_type = other DNA
atctcccatgcggccccggcg

SEQ ID NO: 3343 - DNA, 21 bp, synthetic construct
  source 1..21: mol_type = other DNA
atctcccacgcggccccggcg

SEQ ID NO: 3344 - DNA, 21 bp, synthetic construct
  source 1..21: mol_type = other DNA
ctgccccgcggagcggggatt

SEQ ID NO: 3345 - DNA, 21 bp, synthetic construct
  source 1..21: mol_type = other DNA
ctgccccgtagagcggggatt

SEQ ID NO: 3346 - DNA, 21 bp, synthetic construct
  source 1..21: mol_type = other DNA
ctgccccgaggagcggggatt

SEQ ID NO: 3347 - DNA, 21 bp, synthetic construct
  source 1..21: mol_type = other DNA
ctgccccgtggagcggggatt

SEQ ID NO: 3348 - DNA, 21 bp, synthetic construct
  source 1..21: mol_type = other DNA
ctgccccgaagggcggggatt

SEQ ID NO: 3349 - DNA, 21 bp, synthetic construct
  source 1..21: mol_type = other DNA
ctgccccgcagggcggggatt

SEQ ID NO: 3350 - DNA, 21 bp, synthetic construct
  source 1..21: mol_type = other DNA
ctgccccgaggggcggggatt

SEQ ID NO: 3351 - DNA, 21 bp, synthetic construct
  source 1..21: mol_type = other DNA
ctgccccgcggggcggggatt

SEQ ID NO: 3352 - DNA, 21 bp, synthetic construct
  source 1..21: mol_type = other DNA
ggggatttaccatacgccgcc

SEQ ID NO: 3353 - DNA, 21 bp, synthetic construct
  source 1..21: mol_type = other DNA
ggggatttaacatacgccgcc

SEQ ID NO: 3354 - DNA, 21 bp, synthetic construct
  source 1..21: mol_type = other DNA
ggggatttgacatacgccgcc

SEQ ID NO: 3355 - DNA, 21 bp, synthetic construct
  source 1..21: mol_type = other DNA
ggggatttgtcatacgccgcc

SEQ ID NO: 3356 - DNA, 21 bp, synthetic construct
  source 1..21: mol_type = other DNA
ggggatttgacgtacgccgcc

SEQ ID NO: 3357 - DNA, 21 bp, synthetic construct
  source 1..21: mol_type = other DNA
ggggatttgtcgtacgccgcc

SEQ ID NO: 3358 - DNA, 21 bp, synthetic construct
  source 1..21: mol_type = other DNA
ggggatttaccgtacgccgcc

SEQ ID NO: 3359 - DNA, 21 bp, synthetic construct
  source 1..21: mol_type = other DNA
ggggatttgccgtacgccgcc

SEQ ID NO: 3360 - DNA, 21 bp, synthetic construct
  source 1..21: mol_type = other DNA
gccgcccccccgcctccggac

SEQ ID NO: 3361 - DNA, 21 bp, synthetic construct
  source 1..21: mol_type = other DNA
gccgccccatcacctccggac

SEQ ID NO: 3362 - DNA, 21 bp, synthetic construct
  source 1..21: mol_type = other DNA
gccgcccctacccctccggac

SEQ ID NO: 3363 - DNA, 21 bp, synthetic construct
  source 1..21: mol_type = other DNA
gccgcccccacccctccggac

SEQ ID NO: 3364 - DNA, 21 bp, synthetic construct
  source 1..21: mol_type = other DNA
gccgccccatcccctccggac

SEQ ID NO: 3365 - DNA, 21 bp, synthetic construct
  source 1..21: mol_type = other DNA
gccgccccctcccctccggac

SEQ ID NO: 3366 - DNA, 21 bp, synthetic construct
  source 1..21: mol_type = other DNA
gccgccccaccccctccggac

SEQ ID NO: 3367 - DNA, 21 bp, synthetic construct
  source 1..21: mol_type = other DNA
gccgcccctccccctccggac

SEQ ID NO: 3368 - DNA, 21 bp, synthetic construct
  source 1..21: mol_type = other DNA
gggcgctcaacgaccctcagg

SEQ ID NO: 3369 - DNA, 21 bp, synthetic construct
  source 1..21: mol_type = other DNA
gggcgctccacaaccctcagg

SEQ ID NO: 3370 - DNA, 21 bp, synthetic construct
  source 1..21: mol_type = other DNA
gggcgctcgacaaccctcagg

SEQ ID NO: 3371 - DNA, 21 bp, synthetic construct
  source 1..21: mol_type = other DNA
gggcgctcagcaaccctcagg

SEQ ID NO: 3372 - DNA, 21 bp, synthetic construct
  source 1..21: mol_type = other DNA
gggcgctccgcaaccctcagg

SEQ ID NO: 3373 - DNA, 21 bp, synthetic construct
  source 1..21: mol_type = other DNA
gggcgctcggcaaccctcagg

SEQ ID NO: 3374 - DNA, 21 bp, synthetic construct
  source 1..21: mol_type = other DNA
gggcgctccgcgaccctcagg

SEQ ID NO: 3375 - DNA, 21 bp, synthetic construct
  source 1..21: mol_type = other DNA
gggcgctcggcgaccctcagg

SEQ ID NO: 3376 - DNA, 21 bp, synthetic construct
  source 1..21: mol_type = other DNA
ggcgctctaactccctcaggc

SEQ ID NO: 3377 - DNA, 21 bp, synthetic construct
  source 1..21: mol_type = other DNA
ggcgctctgactccctcaggc

SEQ ID NO: 3378 - DNA, 21 bp, synthetic construct
  source 1..21: mol_type = other DNA
ggcgctctagctccctcaggc

SEQ ID NO: 3379 - DNA, 21 bp, synthetic construct
  source 1..21: mol_type = other DNA
ggcgctctggctccctcaggc

SEQ ID NO: 3380 - DNA, 21 bp, synthetic construct
  source 1..21: mol_type = other DNA
ggcgctctaaccccctcaggc

SEQ ID NO: 3381 - DNA, 21 bp, synthetic construct
  source 1..21: mol_type = other DNA
ggcgctctgaccccctcaggc

SEQ ID NO: 3382 - DNA, 21 bp, synthetic construct
  source 1..21: mol_type = other DNA
ggcgctctagccccctcaggc

SEQ ID NO: 3383 - DNA, 21 bp, synthetic construct
  source 1..21: mol_type = other DNA
ggcgctctggccccctcaggc

SEQ ID NO: 3384 - DNA, 21 bp, synthetic construct
  source 1..21: mol_type = other DNA
cctcaggcaacacggtggcct

SEQ ID NO: 3385 - DNA, 21 bp, synthetic construct
  source 1..21: mol_type = other DNA
cctcaggcagcacggtggcct

SEQ ID NO: 3386 - DNA, 21 bp, synthetic construct
  source 1..21: mol_type = other DNA
cctcaggccgcacggtggcct

SEQ ID NO: 3387 - DNA, 21 bp, synthetic construct
  source 1..21: mol_type = other DNA
cctcaggcaacccggtggcct

SEQ ID NO: 3388 - DNA, 21 bp, synthetic construct
  source 1..21: mol_type = other DNA
cctcaggccacccggtggcct

SEQ ID NO: 3389 - DNA, 21 bp, synthetic construct
  source 1..21: mol_type = other DNA
cctcaggcagcccggtggcct

SEQ ID NO: 3390 - DNA, 21 bp, synthetic construct
  source 1..21: mol_type = other DNA
cctcaggcggcccggtggcct

SEQ ID NO: 3391 - DNA, 21 bp, synthetic construct
  source 1..21: mol_type = other DNA
cctcaggcaacgcggtggcct

SEQ ID NO: 3392 - DNA, 21 bp, synthetic construct
  source 1..21: mol_type = other DNA
ccgctcaaaagaggccgcagg

SEQ ID NO: 3393 - DNA, 21 bp, synthetic construct
  source 1..21: mol_type = other DNA
ccgctcaacagaggccgcagg

SEQ ID NO: 3394 - DNA, 21 bp, synthetic construct
  source 1..21: mol_type = other DNA
ccgctcaacggaggccgcagg

SEQ ID NO: 3395 - DNA, 21 bp, synthetic construct
  source 1..21: mol_type = other DNA
ccgctcaaaagtggccgcagg

SEQ ID NO: 3396 - DNA, 21 bp, synthetic construct
  source 1..21: mol_type = other DNA
ccgctcaacagtggccgcagg

SEQ ID NO: 3397 - DNA, 21 bp, synthetic construct
  source 1..21: mol_type = other DNA
ccgctcaaaggtggccgcagg

SEQ ID NO: 3398 - DNA, 21 bp, synthetic construct
  source 1..21: mol_type = other DNA
ccgctcaaaagcggccgcagg

SEQ ID NO: 3399 - DNA, 21 bp, synthetic construct
  source 1..21: mol_type = other DNA
ccgctcaatagcggccgcagg

SEQ ID NO: 3400 - DNA, 21 bp, synthetic construct
  source 1..21: mol_type = other DNA
aaccccaaaacagggcagctc

SEQ ID NO: 3401 - DNA, 21 bp, synthetic construct
  source 1..21: mol_type = other DNA
aaccccaatgcagggcagctc

SEQ ID NO: 3402 - DNA, 21 bp, synthetic construct
  source 1..21: mol_type = other DNA
aaccccaaagctgggcagctc

SEQ ID NO: 3403 - DNA, 21 bp, synthetic construct
  source 1..21: mol_type = other DNA
aaccccaatgctgggcagctc

SEQ ID NO: 3404 - DNA, 21 bp, synthetic construct
  source 1..21: mol_type = other DNA
aaccccaaaaccgggcagctc

SEQ ID NO: 3405 - DNA, 21 bp, synthetic construct
  source 1..21: mol_type = other DNA
aaccccaaagccgggcagctc

SEQ ID NO: 3406 - DNA, 21 bp, synthetic construct
  source 1..21: mol_type = other DNA
aaccccaatgccgggcagctc

SEQ ID NO: 3407 - DNA, 21 bp, synthetic construct
  source 1..21: mol_type = other DNA
aaccccaacgccgggcagctc

SEQ ID NO: 3408 - DNA, 21 bp, synthetic construct
  source 1..21: mol_type = other DNA
cctccgccggcccgcggcagg

SEQ ID NO: 3409 - DNA, 21 bp, synthetic construct
  source 1..21: mol_type = other DNA
cctccgccagcacgcggcagg

SEQ ID NO: 3410 - DNA, 21 bp, synthetic construct
  source 1..21: mol_type = other DNA
cctccgccaactcgcggcagg

SEQ ID NO: 3411 - DNA, 21 bp, synthetic construct
  source 1..21: mol_type = other DNA
cctccgcccactcgcggcagg

SEQ ID NO: 3412 - DNA, 21 bp, synthetic construct
  source 1..21: mol_type = other DNA
cctccgccggctcgcggcagg

SEQ ID NO: 3413 - DNA, 21 bp, synthetic construct
  source 1..21: mol_type = other DNA
cctccgcccacccgcggcagg

SEQ ID NO: 3414 - DNA, 21 bp, synthetic construct
  source 1..21: mol_type = other DNA
cctccgccgacccgcggcagg

SEQ ID NO: 3415 - DNA, 21 bp, synthetic construct
  source 1..21: mol_type = other DNA
cctccgccagcccgcggcagg

SEQ ID NO: 3416 - DNA, 21 bp, synthetic construct
  source 1..21: mol_type = other DNA
ctccgcctaagagcggcaggg

SEQ ID NO: 3417 - DNA, 21 bp, synthetic construct
  source 1..21: mol_type = other DNA
ctccgcctgagagcggcaggg

SEQ ID NO: 3418 - DNA, 21 bp, synthetic construct
  source 1..21: mol_type = other DNA
ctccgcctaggagcggcaggg

SEQ ID NO: 3419 - DNA, 21 bp, synthetic construct
  source 1..21: mol_type = other DNA
ctccgcctgggagcggcaggg

SEQ ID NO: 3420 - DNA, 21 bp, synthetic construct
  source 1..21: mol_type = other DNA
ctccgcctaagggcggcaggg

SEQ ID NO: 3421 - DNA, 21 bp, synthetic construct
  source 1..21: mol_type = other DNA
ctccgcctgagggcggcaggg

SEQ ID NO: 3422 - DNA, 21 bp, synthetic construct
  source 1..21: mol_type = other DNA
ctccgcctaggggcggcaggg

SEQ ID NO: 3423 - DNA, 21 bp, synthetic construct
  source 1..21: mol_type = other DNA
ctccgcctgggggcggcaggg

SEQ ID NO: 3424 - DNA, 21 bp, synthetic construct
  source 1..21: mol_type = other DNA
ctccgcgctcccggggcagat

SEQ ID NO: 3425 - DNA, 21 bp, synthetic construct
  source 1..21: mol_type = other DNA
ctccgcgctactggggcagat

SEQ ID NO: 3426 - DNA, 21 bp, synthetic construct
  source 1..21: mol_type = other DNA
ctccgcgcttctggggcagat

SEQ ID NO: 3427 - DNA, 21 bp, synthetic construct
  source 1..21: mol_type = other DNA
ctccgcgcacctggggcagat

SEQ ID NO: 3428 - DNA, 21 bp, synthetic construct
  source 1..21: mol_type = other DNA
ctccgcgctcctggggcagat

SEQ ID NO: 3429 - DNA, 21 bp, synthetic construct
  source 1..21: mol_type = other DNA
ctccgcgcccctggggcagat

SEQ ID NO: 3430 - DNA, 21 bp, synthetic construct
  source 1..21: mol_type = other DNA
ctccgcgcaaccggggcagat

SEQ ID NO: 3431 - DNA, 21 bp, synthetic construct
  source 1..21: mol_type = other DNA
ctccgcgccaccggggcagat

SEQ ID NO: 3432 - DNA, 21 bp, synthetic construct
  source 1..21: mol_type = other DNA
cgcggcagaaggagatgcaag

SEQ ID NO: 3433 - DNA, 21 bp, synthetic construct
  source 1..21: mol_type = other DNA
cgcggcagaagaagatgcaag

SEQ ID NO: 3434 - DNA, 21 bp, synthetic construct
  source 1..21: mol_type = other DNA
cgcggcagtagaagatgcaag

SEQ ID NO: 3435 - DNA, 21 bp, synthetic construct
  source 1..21: mol_type = other DNA
cgcggcagctgaagatgcaag

SEQ ID NO: 3436 - DNA, 21 bp, synthetic construct
  source 1..21: mol_type = other DNA
cgcggcagacgaagatgcaag

SEQ ID NO: 3437 - DNA, 21 bp, synthetic construct
  source 1..21: mol_type = other DNA
cgcggcagccgaagatgcaag

SEQ ID NO: 3438 - DNA, 21 bp, synthetic construct
  source 1..21: mol_type = other DNA
cgcggcagctggagatgcaag

SEQ ID NO: 3439 - DNA, 21 bp, synthetic construct
  source 1..21: mol_type = other DNA
cgcggcagacggagatgcaag

SEQ ID NO: 3440 - DNA, 21 bp, synthetic construct
  source 1..21: mol_type = other DNA
cccggcgcggtaccaggcgct

SEQ ID NO: 3441 - DNA, 21 bp, synthetic construct
  source 1..21: mol_type = other DNA
cccggcgcagtgccaggcgct

SEQ ID NO: 3442 - DNA, 21 bp, synthetic construct
  source 1..21: mol_type = other DNA
cccggcgcaataccaggcgct

SEQ ID NO: 3443 - DNA, 21 bp, synthetic construct
  source 1..21: mol_type = other DNA
cccggcgcgataccaggcgct

SEQ ID NO: 3444 - DNA, 21 bp, synthetic construct
  source 1..21: mol_type = other DNA
cccggcgcagtaccaggcgct

SEQ ID NO: 3445 - DNA, 21 bp, synthetic construct
  source 1..21: mol_type = other DNA
cccggcgcaatgccaggcgct

SEQ ID NO: 3446 - DNA, 21 bp, synthetic construct
  source 1..21: mol_type = other DNA
cccggcgcgatgccaggcgct

SEQ ID NO: 3447 - DNA, 21 bp, synthetic construct
  source 1..21: mol_type = other DNA
cccggcgcggtgccaggcgct

SEQ ID NO: 3448 - DNA, 21 bp, synthetic construct
  source 1..21: mol_type = other DNA
aggagccgaagacctggtctg

SEQ ID NO: 3449 - DNA, 21 bp, synthetic construct
  source 1..21: mol_type = other DNA
aggagccgtagacctggtctg

SEQ ID NO: 3450 - DNA, 21 bp, synthetic construct
  source 1..21: mol_type = other DNA
aggagccgaggacctggtctg

SEQ ID NO: 3451 - DNA, 21 bp, synthetic construct
  source 1..21: mol_type = other DNA
aggagccgcggacctggtctg

SEQ ID NO: 3452 - DNA, 21 bp, synthetic construct
  source 1..21: mol_type = other DNA
aggagccgtaggcctggtctg

SEQ ID NO: 3453 - DNA, 21 bp, synthetic construct
  source 1..21: mol_type = other DNA
aggagccgagggcctggtctg

SEQ ID NO: 3454 - DNA, 21 bp, synthetic construct
  source 1..21: mol_type = other DNA
aggagccgtgggcctggtctg

SEQ ID NO: 3455 - DNA, 21 bp, synthetic construct
  source 1..21: mol_type = other DNA
aggagccgcgggcctggtctg

SEQ ID NO: 3456 - DNA, 21 bp, synthetic construct
  source 1..21: mol_type = other DNA
tgagctccgagagagcccgga

SEQ ID NO: 3457 - DNA, 21 bp, synthetic construct
  source 1..21: mol_type = other DNA
tgagctccaagagagcccgga

SEQ ID NO: 3458 - DNA, 21 bp, synthetic construct
  source 1..21: mol_type = other DNA
tgagctccatgagagcccgga

SEQ ID NO: 3459 - DNA, 21 bp, synthetic construct
  source 1..21: mol_type = other DNA
tgagctccacgagagcccgga

SEQ ID NO: 3460 - DNA, 21 bp, synthetic construct
  source 1..21: mol_type = other DNA
tgagctccaagggagcccgga

SEQ ID NO: 3461 - DNA, 21 bp, synthetic construct
  source 1..21: mol_type = other DNA
tgagctcccagggagcccgga

SEQ ID NO: 3462 - DNA, 21 bp, synthetic construct
  source 1..21: mol_type = other DNA
tgagctccgagggagcccgga

SEQ ID NO: 3463 - DNA, 21 bp, synthetic construct
  source 1..21: mol_type = other DNA
tgagctccccgggagcccgga

SEQ ID NO: 3464 - DNA, 21 bp, synthetic construct
  source 1..21: mol_type = other DNA
ctggcgagaacagagtttctg

SEQ ID NO: 3465 - DNA, 21 bp, synthetic construct
  source 1..21: mol_type = other DNA
ctggcgaggacagagtttctg

SEQ ID NO: 3466 - DNA, 21 bp, synthetic construct
  source 1..21: mol_type = other DNA
ctggcgagggcagagtttctg

SEQ ID NO: 3467 - DNA, 21 bp, synthetic construct
  source 1..21: mol_type = other DNA
ctggcgaggactgagtttctg

SEQ ID NO: 3468 - DNA, 21 bp, synthetic construct
  source 1..21: mol_type = other DNA
ctggcgagagctgagtttctg

SEQ ID NO: 3469 - DNA, 21 bp, synthetic construct
  source 1..21: mol_type = other DNA
ctggcgagaaccgagtttctg

SEQ ID NO: 3470 - DNA, 21 bp, synthetic construct
  source 1..21: mol_type = other DNA
ctggcgagagccgagtttctg

SEQ ID NO: 3471 - DNA, 21 bp, synthetic construct
  source 1..21: mol_type = other DNA
ctggcgagggccgagtttctg

SEQ ID NO: 3472 - DNA, 21 bp, synthetic construct
  source 1..21: mol_type = other DNA
agtttctggcgaaggcgcaac

SEQ ID NO: 3473 - DNA, 21 bp, synthetic construct
  source 1..21: mol_type = other DNA
agtttctgatgaaggcgcaac

SEQ ID NO: 3474 - DNA, 21 bp, synthetic construct
  source 1..21: mol_type = other DNA
agtttctggtgaaggcgcaac

SEQ ID NO: 3475 - DNA, 21 bp, synthetic construct
  source 1..21: mol_type = other DNA
agtttctgacgaaggcgcaac

SEQ ID NO: 3476 - DNA, 21 bp, synthetic construct
  source 1..21: mol_type = other DNA
agtttctgatggaggcgcaac

SEQ ID NO: 3477 - DNA, 21 bp, synthetic construct
  source 1..21: mol_type = other DNA
agtttctggtggaggcgcaac

SEQ ID NO: 3478 - DNA, 21 bp, synthetic construct
  source 1..21: mol_type = other DNA
agtttctgacggaggcgcaac

SEQ ID NO: 3479 - DNA, 21 bp, synthetic construct
  source 1..21: mol_type = other DNA
agtttctggcggaggcgcaac

SEQ ID NO: 3480 - DNA, 21 bp, synthetic construct
  source 1..21: mol_type = other DNA
aggcgcaagatatcctagaaa

SEQ ID NO: 3481 - DNA, 21 bp, synthetic construct
  source 1..21: mol_type = other DNA
aggcgcaaaatatcctagaaa

SEQ ID NO: 3482 - DNA, 21 bp, synthetic construct
  source 1..21: mol_type = other DNA
aggcgcaaagtatcctagaaa

SEQ ID NO: 3483 - DNA, 21 bp, synthetic construct
  source 1..21: mol_type = other DNA
aggcgcaaggtatcctagaaa

SEQ ID NO: 3484 - DNA, 21 bp, synthetic construct
  source 1..21: mol_type = other DNA
aggcgcaaaatgtcctagaaa

SEQ ID NO: 3485 - DNA, 21 bp, synthetic construct
  source 1..21: mol_type = other DNA
aggcgcaagatgtcctagaaa

SEQ ID NO: 3486 - DNA, 21 bp, synthetic construct
  source 1..21: mol_type = other DNA
aggcgcaaagtgtcctagaaa

SEQ ID NO: 3487 - DNA, 21 bp, synthetic construct
  source 1..21: mol_type = other DNA
aggcgcaaggtgtcctagaaa

SEQ ID NO: 3488 - DNA, 21 bp, synthetic construct
  source 1..21: mol_type = other DNA
acctctccatgtaacggaggc

SEQ ID NO: 3489 - DNA, 21 bp, synthetic construct
  source 1..21: mol_type = other DNA
acctctccccgtaacggaggc

SEQ ID NO: 3490 - DNA, 21 bp, synthetic construct
  source 1..21: mol_type = other DNA
acctctccgcgtaacggaggc

SEQ ID NO: 3491 - DNA, 21 bp, synthetic construct
  source 1..21: mol_type = other DNA
acctctccatgcaacggaggc

SEQ ID NO: 3492 - DNA, 21 bp, synthetic construct
  source 1..21: mol_type = other DNA
acctctccctgcaacggaggc

SEQ ID NO: 3493 - DNA, 21 bp, synthetic construct
  source 1..21: mol_type = other DNA
acctctccgtgcaacggaggc

SEQ ID NO: 3494 - DNA, 21 bp, synthetic construct
  source 1..21: mol_type = other DNA
acctctccacgcaacggaggc

SEQ ID NO: 3495 - DNA, 21 bp, synthetic construct
  source 1..21: mol_type = other DNA
acctctccccgcaacggaggc

SEQ ID NO: 3496 - DNA, 21 bp, synthetic construct
  source 1..21: mol_type = other DNA
ctagaaacccatgccccgggg

SEQ ID NO: 3497 - DNA, 21 bp, synthetic construct
  source 1..21: mol_type = other DNA
ctagaaactaaagccccgggg

SEQ ID NO: 3498 - DNA, 21 bp, synthetic construct
  source 1..21: mol_type = other DNA
ctagaaaccaaagccccgggg

SEQ ID NO: 3499 - DNA, 21 bp, synthetic construct
  source 1..21: mol_type = other DNA
ctagaaacataagccccgggg

SEQ ID NO: 3500 - DNA, 21 bp, synthetic construct
  source 1..21: mol_type = other DNA
ctagaaacacaagccccgggg

SEQ ID NO: 3501 - DNA, 21 bp, synthetic construct
  source 1..21: mol_type = other DNA
ctagaaacatatgccccgggg

SEQ ID NO: 3502 - DNA, 21 bp, synthetic construct
  source 1..21: mol_type = other DNA
ctagaaacttacgccccgggg

SEQ ID NO: 3503 - DNA, 21 bp, synthetic construct
  source 1..21: mol_type = other DNA
ctagaaacacacgccccgggg

SEQ ID NO: 3504 - DNA, 21 bp, synthetic construct
  source 1..21: mol_type = other DNA
ggggacgattaaggcgacgga

SEQ ID NO: 3505 - DNA, 21 bp, synthetic construct
  source 1..21: mol_type = other DNA
ggggacgaaaagggcgacgga

SEQ ID NO: 3506 - DNA, 21 bp, synthetic construct
  source 1..21: mol_type = other DNA
ggggacgaatagggcgacgga

SEQ ID NO: 3507 - DNA, 21 bp, synthetic construct
  source 1..21: mol_type = other DNA
ggggacgattagggcgacgga

SEQ ID NO: 3508 - DNA, 21 bp, synthetic construct
  source 1..21: mol_type = other DNA
ggggacgactagggcgacgga

SEQ ID NO: 3509 - DNA, 21 bp, synthetic construct
  source 1..21: mol_type = other DNA
ggggacgatcagggcgacgga

SEQ ID NO: 3510 - DNA, 21 bp, synthetic construct
  source 1..21: mol_type = other DNA
ggggacgaccagggcgacgga

SEQ ID NO: 3511 - DNA, 21 bp, synthetic construct
  source 1..21: mol_type = other DNA
ggggacgaccatggcgacgga

SEQ ID NO: 3512 - DNA, 21 bp, synthetic construct
  source 1..21: mol_type = other DNA
ggacggcgtagaagactcgtt

SEQ ID NO: 3513 - DNA, 21 bp, synthetic construct
  source 1..21: mol_type = other DNA
ggacggcgcagaagactcgtt

SEQ ID NO: 3514 - DNA, 21 bp, synthetic construct
  source 1..21: mol_type = other DNA
ggacggcgtggaagactcgtt

SEQ ID NO: 3515 - DNA, 21 bp, synthetic construct
  source 1..21: mol_type = other DNA
ggacggcgtagtagactcgtt

SEQ ID NO: 3516 - DNA, 21 bp, synthetic construct
  source 1..21: mol_type = other DNA
ggacggcgtggtagactcgtt

SEQ ID NO: 3517 - DNA, 21 bp, synthetic construct
  source 1..21: mol_type = other DNA
ggacggcgcggtagactcgtt

SEQ ID NO: 3518 - DNA, 21 bp, synthetic construct
  source 1..21: mol_type = other DNA
ggacggcgtggcagactcgtt

SEQ ID NO: 3519 - DNA, 21 bp, synthetic construct
  source 1..21: mol_type = other DNA
ggacggcgcggcagactcgtt

SEQ ID NO: 3520 - DNA, 21 bp, synthetic construct
  source 1..21: mol_type = other DNA
gacggcgagagtgactcgttt

SEQ ID NO: 3521 - DNA, 21 bp, synthetic construct
  source 1..21: mol_type = other DNA
gacggcgagtgtgactcgttt

SEQ ID NO: 3522 - DNA, 21 bp, synthetic construct
  source 1..21: mol_type = other DNA
gacggcgaacgtgactcgttt

SEQ ID NO: 3523 - DNA, 21 bp, synthetic construct
  source 1..21: mol_type = other DNA
gacggcgaatgcgactcgttt

SEQ ID NO: 3524 - DNA, 21 bp, synthetic construct
  source 1..21: mol_type = other DNA
gacggcgagtgcgactcgttt

SEQ ID NO: 3525 - DNA, 21 bp, synthetic construct
  source 1..21: mol_type = other DNA
gacggcgaacgcgactcgttt

SEQ ID NO: 3526 - DNA, 21 bp, synthetic construct
  source 1..21: mol_type = other DNA
gacggcgagcgcgactcgttt

SEQ ID NO: 3527 - DNA, 21 bp, synthetic construct
  source 1..21: mol_type = other DNA
gacggcgagcgggactcgttt

SEQ ID NO: 3528 - DNA, 21 bp, synthetic construct
  source 1..21: mol_type = other DNA
acggcgacaaaaactcgtttg

SEQ ID NO: 3529 - DNA, 21 bp, synthetic construct
  source 1..21: mol_type = other DNA
acggcgactaaaactcgtttg

SEQ ID NO: 3530 - DNA, 21 bp, synthetic construct
  source 1..21: mol_type = other DNA
acggcgaccaaaactcgtttg

SEQ ID NO: 3531 - DNA, 21 bp, synthetic construct
  source 1..21: mol_type = other DNA
acggcgacataaactcgtttg

SEQ ID NO: 3532 - DNA, 21 bp, synthetic construct
  source 1..21: mol_type = other DNA
acggcgacttaaactcgtttg

SEQ ID NO: 3533 - DNA, 21 bp, synthetic construct
  source 1..21: mol_type = other DNA
acggcgacctaaactcgtttg

SEQ ID NO: 3534 - DNA, 21 bp, synthetic construct
  source 1..21: mol_type = other DNA
acggcgacacaaactcgtttg

SEQ ID NO: 3535 - DNA, 21 bp, synthetic construct
  source 1..21: mol_type = other DNA
acggcgacccaaactcgtttg

SEQ ID NO: 3536 - DNA, 21 bp, synthetic construct
  source 1..21: mol_type = other DNA
cggcgacgatgtctcgtttgg

SEQ ID NO: 3537 - DNA, 21 bp, synthetic construct
  source 1..21: mol_type = other DNA
cggcgacgttgtctcgtttgg

SEQ ID NO: 3538 - DNA, 21 bp, synthetic construct
  source 1..21: mol_type = other DNA
cggcgacgctgtctcgtttgg

SEQ ID NO: 3539 - DNA, 21 bp, synthetic construct
  source 1..21: mol_type = other DNA
cggcgacgacgtctcgtttgg

SEQ ID NO: 3540 - DNA, 21 bp, synthetic construct
  source 1..21: mol_type = other DNA
cggcgacgtcgtctcgtttgg

SEQ ID NO: 3541 - DNA, 21 bp, synthetic construct
  source 1..21: mol_type = other DNA
cggcgacgccgtctcgtttgg

SEQ ID NO: 3542 - DNA, 21 bp, synthetic construct
  source 1..21: mol_type = other DNA
cggcgacgatgcctcgtttgg

SEQ ID NO: 3543 - DNA, 21 bp, synthetic construct
  source 1..21: mol_type = other DNA
cggcgacgctggctcgtttgg

SEQ ID NO: 3544 - DNA, 21 bp, synthetic construct
  source 1..21: mol_type = other DNA
ggcgacggttaatcgtttgga

SEQ ID NO: 3545 - DNA, 21 bp, synthetic construct
  source 1..21: mol_type = other DNA
ggcgacggctaatcgtttgga

SEQ ID NO: 3546 - DNA, 21 bp, synthetic construct
  source 1..21: mol_type = other DNA
ggcgacggccaatcgtttgga

SEQ ID NO: 3547 - DNA, 21 bp, synthetic construct
  source 1..21: mol_type = other DNA
ggcgacggtaagtcgtttgga

SEQ ID NO: 3548 - DNA, 21 bp, synthetic construct
  source 1..21: mol_type = other DNA
ggcgacggttagtcgtttgga

SEQ ID NO: 3549 - DNA, 21 bp, synthetic construct
  source 1..21: mol_type = other DNA
ggcgacggctagtcgtttgga

SEQ ID NO: 3550 - DNA, 21 bp, synthetic construct
  source 1..21: mol_type = other DNA
ggcgacggtcagtcgtttgga

SEQ ID NO: 3551 - DNA, 21 bp, synthetic construct
  source 1..21: mol_type = other DNA
ggcgacggtcattcgtttgga

SEQ ID NO: 3552 - DNA, 21 bp, synthetic construct
  source 1..21: mol_type = other DNA
gcgacggaatcacgtttggac

SEQ ID NO: 3553 - DNA, 21 bp, synthetic construct
  source 1..21: mol_type = other DNA
gcgacggactcacgtttggac

SEQ ID NO: 3554 - DNA, 21 bp, synthetic construct
  source 1..21: mol_type = other DNA
gcgacggaatcccgtttggac

SEQ ID NO: 3555 - DNA, 21 bp, synthetic construct
  source 1..21: mol_type = other DNA
gcgacggactcccgtttggac

SEQ ID NO: 3556 - DNA, 21 bp, synthetic construct
  source 1..21: mol_type = other DNA
gcgacggaatcgcgtttggac

SEQ ID NO: 3557 - DNA, 21 bp, synthetic construct
  source 1..21: mol_type = other DNA
gcgacggattcgcgtttggac

SEQ ID NO: 3558 - DNA, 21 bp, synthetic construct
  source 1..21: mol_type = other DNA
gcgacggactcgcgtttggac

SEQ ID NO: 3559 - DNA, 21 bp, synthetic construct
  source 1..21: mol_type = other DNA
gcgacggaaccgcgtttggac

SEQ ID NO: 3560 - DNA, 21 bp, synthetic construct
  source 1..21: mol_type = other DNA
gaggccctcagtgcctgcttt

SEQ ID NO: 3561 - DNA, 21 bp, synthetic construct
  source 1..21: mol_type = other DNA
gaggccctaggtgcctgcttt

SEQ ID NO: 3562 - DNA, 21 bp, synthetic construct
  source 1..21: mol_type = other DNA
gaggccctcggtgcctgcttt

SEQ ID NO: 3563 - DNA, 21 bp, synthetic construct
  source 1..21: mol_type = other DNA
gaggccctaagcgcctgcttt

SEQ ID NO: 3564 - DNA, 21 bp, synthetic construct
  source 1..21: mol_type = other DNA
gaggcccttagcgcctgcttt

SEQ ID NO: 3565 - DNA, 21 bp, synthetic construct
  source 1..21: mol_type = other DNA
gaggccctcagcgcctgcttt

SEQ ID NO: 3566 - DNA, 21 bp, synthetic construct
  source 1..21: mol_type = other DNA
gaggccctcggcgcctgcttt

SEQ ID NO: 3567 - DNA, 21 bp, synthetic construct
  source 1..21: mol_type = other DNA
gaggccctcggggcctgcttt

SEQ ID NO: 3568 - DNA, 21 bp, synthetic construct
  source 1..21: mol_type = other DNA
gccctgcgtacatgctttgag

SEQ ID NO: 3569 - DNA, 21 bp, synthetic construct
  source 1..21: mol_type = other DNA
gccctgcgcacatgctttgag

SEQ ID NO: 3570 - DNA, 21 bp, synthetic construct
  source 1..21: mol_type = other DNA
gccctgcgttcatgctttgag

SEQ ID NO: 3571 - DNA, 21 bp, synthetic construct
  source 1..21: mol_type = other DNA
gccctgcgctcatgctttgag

SEQ ID NO: 3572 - DNA, 21 bp, synthetic construct
  source 1..21: mol_type = other DNA
gccctgcgtccatgctttgag

SEQ ID NO: 3573 - DNA, 21 bp, synthetic construct
  source 1..21: mol_type = other DNA
gccctgcgcccatgctttgag

SEQ ID NO: 3574 - DNA, 21 bp, synthetic construct
  source 1..21: mol_type = other DNA
gccctgcgtacgtgctttgag

SEQ ID NO: 3575 - DNA, 21 bp, synthetic construct
  source 1..21: mol_type = other DNA
gccctgcgtccttgctttgag

SEQ ID NO: 3576 - DNA, 21 bp, synthetic construct
  source 1..21: mol_type = other DNA
ccgggaggtacaggccagaga

SEQ ID NO: 3577 - DNA, 21 bp, synthetic construct
  source 1..21: mol_type = other DNA
ccgggaggcacaggccagaga

SEQ ID NO: 3578 - DNA, 21 bp, synthetic construct
  source 1..21: mol_type = other DNA
ccgggaggttcaggccagaga

SEQ ID NO: 3579 - DNA, 21 bp, synthetic construct
  source 1..21: mol_type = other DNA
ccgggaggctcaggccagaga

SEQ ID NO: 3580 - DNA, 21 bp, synthetic construct
  source 1..21: mol_type = other DNA
ccgggaggtccaggccagaga

SEQ ID NO: 3581 - DNA, 21 bp, synthetic construct
  source 1..21: mol_type = other DNA
ccgggaggcccaggccagaga

SEQ ID NO: 3582 - DNA, 21 bp, synthetic construct
  source 1..21: mol_type = other DNA
ccgggaggtaccggccagaga

SEQ ID NO: 3583 - DNA, 21 bp, synthetic construct
  source 1..21: mol_type = other DNA
ccgggaggtcccggccagaga

SEQ ID NO: 3584 - DNA, 21 bp, synthetic construct
  source 1..21: mol_type = other DNA
gaggagctaacaagagagacg

SEQ ID NO: 3585 - DNA, 21 bp, synthetic construct
  source 1..21: mol_type = other DNA
gaggagcttacaagagagacg

SEQ ID NO: 3586 - DNA, 21 bp, synthetic construct
  source 1..21: mol_type = other DNA
gaggagctcacaagagagacg

SEQ ID NO: 3587 - DNA, 21 bp, synthetic construct
  source 1..21: mol_type = other DNA
gaggagctatcaagagagacg

SEQ ID NO: 3588 - DNA, 21 bp, synthetic construct
  source 1..21: mol_type = other DNA
gaggagctttcaagagagacg

SEQ ID NO: 3589 - DNA, 21 bp, synthetic construct
  source 1..21: mol_type = other DNA
gaggagctctcaagagagacg

SEQ ID NO: 3590 - DNA, 21 bp, synthetic construct
  source 1..21: mol_type = other DNA
gaggagcttccgagagagacg

SEQ ID NO: 3591 - DNA, 21 bp, synthetic construct
  source 1..21: mol_type = other DNA
gaggagctccctagagagacg

SEQ ID NO: 3592 - DNA, 21 bp, synthetic construct
  source 1..21: mol_type = other DNA
cggagtcctagtttcagatct

SEQ ID NO: 3593 - DNA, 21 bp, synthetic construct
  source 1..21: mol_type = other DNA
cggagtcccagtttcagatct

SEQ ID NO: 3594 - DNA, 21 bp, synthetic construct
  source 1..21: mol_type = other DNA
cggagtccttgtttcagatct

SEQ ID NO: 3595 - DNA, 21 bp, synthetic construct
  source 1..21: mol_type = other DNA
cggagtccctgtttcagatct

SEQ ID NO: 3596 - DNA, 21 bp, synthetic construct
  source 1..21: mol_type = other DNA
cggagtcctcgtttcagatct

SEQ ID NO: 3597 - DNA, 21 bp, synthetic construct
  source 1..21: mol_type = other DNA
cggagtccccgtttcagatct

SEQ ID NO: 3598 - DNA, 21 bp, synthetic construct
  source 1..21: mol_type = other DNA
cggagtcctagcttcagatct

SEQ ID NO: 3599 - DNA, 21 bp, synthetic construct
  source 1..21: mol_type = other DNA
cggagtcctcggttcagatct

SEQ ID NO: 3600 - DNA, 21 bp, synthetic construct
  source 1..21: mol_type = other DNA
ggagtccaaaaatcagatctg

SEQ ID NO: 3601 - DNA, 21 bp, synthetic construct
  source 1..21: mol_type = other DNA
ggagtccataaatcagatctg

SEQ ID NO: 3602 - DNA, 21 bp, synthetic construct
  source 1..21: mol_type = other DNA
ggagtccacaaatcagatctg

SEQ ID NO: 3603 - DNA, 21 bp, synthetic construct
  source 1..21: mol_type = other DNA
ggagtccaataatcagatctg

SEQ ID NO: 3604 - DNA, 21 bp, synthetic construct
  source 1..21: mol_type = other DNA
ggagtccattaatcagatctg

SEQ ID NO: 3605 - DNA, 21 bp, synthetic construct
  source 1..21: mol_type = other DNA
ggagtccactaatcagatctg

SEQ ID NO: 3606 - DNA, 21 bp, synthetic construct
  source 1..21: mol_type = other DNA
ggagtccaacaatcagatctg

SEQ ID NO: 3607 - DNA, 21 bp, synthetic construct
  source 1..21: mol_type = other DNA
ggagtccaccactcagatctg

SEQ ID NO: 3608 - DNA, 21 bp, synthetic construct
  source 1..21: mol_type = other DNA
gagtccagattacagatctgg

SEQ ID NO: 3609 - DNA, 21 bp, synthetic construct
  source 1..21: mol_type = other DNA
gagtccagtttacagatctgg

SEQ ID NO: 3610 - DNA, 21 bp, synthetic construct
  source 1..21: mol_type = other DNA
gagtccagcttacagatctgg

SEQ ID NO: 3611 - DNA, 21 bp, synthetic construct
  source 1..21: mol_type = other DNA
gagtccagactacagatctgg

SEQ ID NO: 3612 - DNA, 21 bp, synthetic construct
  source 1..21: mol_type = other DNA
gagtccagtctacagatctgg

SEQ ID NO: 3613 - DNA, 21 bp, synthetic construct
  source 1..21: mol_type = other DNA
gagtccagcctacagatctgg

SEQ ID NO: 3614 - DNA, 21 bp, synthetic construct
  source 1..21: mol_type = other DNA
gagtccagattccagatctgg

SEQ ID NO: 3615 - DNA, 21 bp, synthetic construct
  source 1..21: mol_type = other DNA
gagtccagcttccagatctgg

SEQ ID NO: 3616 - DNA, 21 bp, synthetic construct
  source 1..21: mol_type = other DNA
tccaggataaaaatctggttt

SEQ ID NO: 3617 - DNA, 21 bp, synthetic construct
  source 1..21: mol_type = other DNA
tccaggatcaaaatctggttt

SEQ ID NO: 3618 - DNA, 21 bp, synthetic construct
  source 1..21: mol_type = other DNA
tccaggatgaaaatctggttt

SEQ ID NO: 3619 - DNA, 21 bp, synthetic construct
  source 1..21: mol_type = other DNA
tccaggatagaaatctggttt

SEQ ID NO: 3620 - DNA, 21 bp, synthetic construct
  source 1..21: mol_type = other DNA
tccaggatcgaaatctggttt

SEQ ID NO: 3621 - DNA, 21 bp, synthetic construct
  source 1..21: mol_type = other DNA
tccaggatggaaatctggttt

SEQ ID NO: 3622 - DNA, 21 bp, synthetic construct
  source 1..21: mol_type = other DNA
tccaggataaatatctggttt

SEQ ID NO: 3623 - DNA, 21 bp, synthetic construct
  source 1..21: mol_type = other DNA
tccaggatcaatatctggttt

SEQ ID NO: 3624 - DNA, 21 bp, synthetic construct
  source 1..21: mol_type = other DNA
ccaggattatgttctggtttc

SEQ ID NO: 3625 - DNA, 21 bp, synthetic construct
  source 1..21: mol_type = other DNA
ccaggattgtgttctggtttc

SEQ ID NO: 3626 - DNA, 21 bp, synthetic construct
  source 1..21: mol_type = other DNA
ccaggattacgttctggtttc

SEQ ID NO: 3627 - DNA, 21 bp, synthetic construct
  source 1..21: mol_type = other DNA
ccaggattgcgttctggtttc

SEQ ID NO: 3628 - DNA, 21 bp, synthetic construct
  source 1..21: mol_type = other DNA
ccaggattatgctctggtttc

SEQ ID NO: 3629 - DNA, 21 bp, synthetic construct
  source 1..21: mol_type = other DNA
ccaggattgtgctctggtttc

SEQ ID NO: 3630 - DNA, 21 bp, synthetic construct
  source 1..21: mol_type = other DNA
ccaggattacgctctggtttc

SEQ ID NO: 3631 - DNA, 21 bp, synthetic construct
  source 1..21: mol_type = other DNA
ccaggattgtggtctggtttc

SEQ ID NO: 3632 - DNA, 21 bp, synthetic construct
  source 1..21: mol_type = other DNA
caggattctaaactggtttca

SEQ ID NO: 3633 - DNA, 21 bp, synthetic construct
  source 1..21: mol_type = other DNA
caggattccaaactggtttca

SEQ ID NO: 3634 - DNA, 21 bp, synthetic construct
  source 1..21: mol_type = other DNA
caggattcttaactggtttca

SEQ ID NO: 3635 - DNA, 21 bp, synthetic construct
  source 1..21: mol_type = other DNA
caggattcctaactggtttca

SEQ ID NO: 3636 - DNA, 21 bp, synthetic construct
  source 1..21: mol_type = other DNA
caggattctcaactggtttca

SEQ ID NO: 3637 - DNA, 21 bp, synthetic construct
  source 1..21: mol_type = other DNA
caggattcccaactggtttca

SEQ ID NO: 3638 - DNA, 21 bp, synthetic construct
  source 1..21: mol_type = other DNA
caggattctaacctggtttca

SEQ ID NO: 3639 - DNA, 21 bp, synthetic construct
  source 1..21: mol_type = other DNA
caggattctcacctggtttca

SEQ ID NO: 3640 - DNA, 21 bp, synthetic construct
  source 1..21: mol_type = other DNA
ggattcagtacaggtttcaga

SEQ ID NO: 3641 - DNA, 21 bp, synthetic construct
  source 1..21: mol_type = other DNA
ggattcagcacaggtttcaga

SEQ ID NO: 3642 - DNA, 21 bp, synthetic construct
  source 1..21: mol_type = other DNA
ggattcagtccaggtttcaga

SEQ ID NO: 3643 - DNA, 21 bp, synthetic construct
  source 1..21: mol_type = other DNA
ggattcagcccaggtttcaga

SEQ ID NO: 3644 - DNA, 21 bp, synthetic construct
  source 1..21: mol_type = other DNA
ggattcagtgcaggtttcaga

SEQ ID NO: 3645 - DNA, 21 bp, synthetic construct
  source 1..21: mol_type = other DNA
ggattcagcgcaggtttcaga

SEQ ID NO: 3646 - DNA, 21 bp, synthetic construct
  source 1..21: mol_type = other DNA
ggattcagtaccggtttcaga

SEQ ID NO: 3647 - DNA, 21 bp, synthetic construct
  source 1..21: mol_type = other DNA
ggattcagcaccggtttcaga

SEQ ID NO: 3648 - DNA, 21 bp, synthetic construct
  source 1..21: mol_type = other DNA
cagcgcggaacacggcggggg

SEQ ID NO: 3649 - DNA, 21 bp, synthetic construct
  source 1..21: mol_type = other DNA
cagcgcgggacacggcggggg

SEQ ID NO: 3650 - DNA, 21 bp, synthetic construct
  source 1..21: mol_type = other DNA
cagcgcggagcacggcggggg

SEQ ID NO: 3651 - DNA, 21 bp, synthetic construct
  source 1..21: mol_type = other DNA
cagcgcggggcacggcggggg

SEQ ID NO: 3652 - DNA, 21 bp, synthetic construct
  source 1..21: mol_type = other DNA
cagcgcggaacgcggcggggg

SEQ ID NO: 3653 - DNA, 21 bp, synthetic construct
  source 1..21: mol_type = other DNA
cagcgcgggacgcggcggggg

SEQ ID NO: 3654 - DNA, 21 bp, synthetic construct
  source 1..21: mol_type = other DNA
cagcgcggagcgcggcggggg

SEQ ID NO: 3655 - DNA, 21 bp, synthetic construct
  source 1..21: mol_type = other DNA
cagcgcggggctcggcggggg

SEQ ID NO: 3656 - DNA, 21 bp, synthetic construct
  source 1..21: mol_type = other DNA
cccacaccaacacgtggggaa

SEQ ID NO: 3657 - DNA, 21 bp, synthetic construct
  source 1..21: mol_type = other DNA
cccacacctacacgtggggaa

SEQ ID NO: 3658 - DNA, 21 bp, synthetic construct
  source 1..21: mol_type = other DNA
cccacacccacacgtggggaa

SEQ ID NO: 3659 - DNA, 21 bp, synthetic construct
  source 1..21: mol_type = other DNA
cccacaccatcacgtggggaa

SEQ ID NO: 3660 - DNA, 21 bp, synthetic construct
  source 1..21: mol_type = other DNA
cccacaccttcacgtggggaa

SEQ ID NO: 3661 - DNA, 21 bp, synthetic construct
  source 1..21: mol_type = other DNA
cccacaccctcacgtggggaa

SEQ ID NO: 3662 - DNA, 21 bp, synthetic construct
  source 1..21: mol_type = other DNA
cccacaccaccacgtggggaa

SEQ ID NO: 3663 - DNA, 21 bp, synthetic construct
  source 1..21: mol_type = other DNA
cccacacccccacgtggggaa

SEQ ID NO: 3664 - DNA, 21 bp, synthetic construct
  source 1..21: mol_type = other DNA
ctcccacaaagagctttcgtg

SEQ ID NO: 3665 - DNA, 21 bp, synthetic construct
  source 1..21: mol_type = other DNA
ctcccacatagagctttcgtg

SEQ ID NO: 3666 - DNA, 21 bp, synthetic construct
  source 1..21: mol_type = other DNA
ctcccacacagagctttcgtg

SEQ ID NO: 3667 - DNA, 21 bp, synthetic construct
  source 1..21: mol_type = other DNA
ctcccacaatgagctttcgtg

SEQ ID NO: 3668 - DNA, 21 bp, synthetic construct
  source 1..21: mol_type = other DNA
ctcccacattgagctttcgtg

SEQ ID NO: 3669 - DNA, 21 bp, synthetic construct
  source 1..21: mol_type = other DNA
ctcccacactgagctttcgtg

SEQ ID NO: 3670 - DNA, 21 bp, synthetic construct
  source 1..21: mol_type = other DNA
ctcccacaacgagctttcgtg

SEQ ID NO: 3671 - DNA, 21 bp, synthetic construct
  source 1..21: mol_type = other DNA
ctcccacaccgagctttcgtg

SEQ ID NO: 3672 - DNA, 21 bp, synthetic construct
  source 1..21: mol_type = other DNA
cggcgcgcaagaatttcgcct

SEQ ID NO: 3673 - DNA, 21 bp, synthetic construct
  source 1..21: mol_type = other DNA
cggcgcgctagaatttcgcct

SEQ ID NO: 3674 - DNA, 21 bp, synthetic construct
  source 1..21: mol_type = other DNA
cggcgcgccagaatttcgcct

SEQ ID NO: 3675 - DNA, 21 bp, synthetic construct
  source 1..21: mol_type = other DNA
cggcgcgcatgaatttcgcct

SEQ ID NO: 3676 - DNA, 21 bp, synthetic construct
  source 1..21: mol_type = other DNA
cggcgcgcttgaatttcgcct

SEQ ID NO: 3677 - DNA, 21 bp, synthetic construct
  source 1..21: mol_type = other DNA
cggcgcgcctgaatttcgcct

SEQ ID NO: 3678 - DNA, 21 bp, synthetic construct
  source 1..21: mol_type = other DNA
cggcgcgcacgaatttcgcct

SEQ ID NO: 3679 - DNA, 21 bp, synthetic construct
  source 1..21: mol_type = other DNA
cggcgcgcccgaatttcgcct

SEQ ID NO: 3680 - DNA, 21 bp, synthetic construct
  source 1..21: mol_type = other DNA
ggcgcgcgtagttttcgccta

SEQ ID NO: 3681 - DNA, 21 bp, synthetic construct
  source 1..21: mol_type = other DNA
ggcgcgcgatgttttcgccta

SEQ ID NO: 3682 - DNA, 21 bp, synthetic construct
  source 1..21: mol_type = other DNA
ggcgcgcgacgttttcgccta

SEQ ID NO: 3683 - DNA, 21 bp, synthetic construct
  source 1..21: mol_type = other DNA
ggcgcgcgaagctttcgccta

SEQ ID NO: 3684 - DNA, 21 bp, synthetic construct
  source 1..21: mol_type = other DNA
ggcgcgcgtagctttcgccta

SEQ ID NO: 3685 - DNA, 21 bp, synthetic construct
  source 1..21: mol_type = other DNA
ggcgcgcgttgctttcgccta

SEQ ID NO: 3686 - DNA, 21 bp, synthetic construct
  source 1..21: mol_type = other DNA
ggcgcgcgacgctttcgccta

SEQ ID NO: 3687 - DNA, 21 bp, synthetic construct
  source 1..21: mol_type = other DNA
ggcgcgcgccggtttcgccta

SEQ ID NO: 3688 - DNA, 21 bp, synthetic construct
  source 1..21: mol_type = other DNA
gcgcgcggacaattcgcctac

SEQ ID NO: 3689 - DNA, 21 bp, synthetic construct
  source 1..21: mol_type = other DNA
gcgcgcggcaacttcgcctac

SEQ ID NO: 3690 - DNA, 21 bp, synthetic construct
  source 1..21: mol_type = other DNA
gcgcgcggatacttcgcctac

SEQ ID NO: 3691 - DNA, 21 bp, synthetic construct
  source 1..21: mol_type = other DNA
gcgcgcggctacttcgcctac

SEQ ID NO: 3692 - DNA, 21 bp, synthetic construct
  source 1..21: mol_type = other DNA
gcgcgcggacacttcgcctac

SEQ ID NO: 3693 - DNA, 21 bp, synthetic construct
  source 1..21: mol_type = other DNA
gcgcgcggtcacttcgcctac

SEQ ID NO: 3694 - DNA, 21 bp, synthetic construct
  source 1..21: mol_type = other DNA
gcgcgcggccacttcgcctac

SEQ ID NO: 3695 - DNA, 21 bp, synthetic construct
  source 1..21: mol_type = other DNA
gcgcgcggttagttcgcctac

SEQ ID NO: 3696 - DNA, 21 bp, synthetic construct
  source 1..21: mol_type = other DNA
caccctcaaacacctcggtgg

SEQ ID NO: 3697 - DNA, 21 bp, synthetic construct
  source 1..21: mol_type = other DNA
caccctcatacacctcggtgg

SEQ ID NO: 3698 - DNA, 21 bp, synthetic construct
  source 1..21: mol_type = other DNA
caccctcaatcacctcggtgg

SEQ ID NO: 3699 - DNA, 21 bp, synthetic construct
  source 1..21: mol_type = other DNA
caccctcacccccctcggtgg

SEQ ID NO: 3700 - DNA, 21 bp, synthetic construct
  source 1..21: mol_type = other DNA
caccctcaaacgcctcggtgg

SEQ ID NO: 3701 - DNA, 21 bp, synthetic construct
  source 1..21: mol_type = other DNA
caccctcattcgcctcggtgg

SEQ ID NO: 3702 - DNA, 21 bp, synthetic construct
  source 1..21: mol_type = other DNA
caccctcactcgcctcggtgg

SEQ ID NO: 3703 - DNA, 21 bp, synthetic construct
  source 1..21: mol_type = other DNA
caccctcacccgcctcggtgg

SEQ ID NO: 3704 - DNA, 21 bp, synthetic construct
  source 1..21: mol_type = other DNA
ggctcctcaatagcctccgca

SEQ ID NO: 3705 - DNA, 21 bp, synthetic construct
  source 1..21: mol_type = other DNA
ggctcctctatagcctccgca

SEQ ID NO: 3706 - DNA, 21 bp, synthetic construct
  source 1..21: mol_type = other DNA
ggctcctccatagcctccgca

SEQ ID NO: 3707 - DNA, 21 bp, synthetic construct
  source 1..21: mol_type = other DNA
ggctcctcattagcctccgca

SEQ ID NO: 3708 - DNA, 21 bp, synthetic construct
  source 1..21: mol_type = other DNA
ggctcctctttagcctccgca

SEQ ID NO: 3709 - DNA, 21 bp, synthetic construct
  source 1..21: mol_type = other DNA
ggctcctccttagcctccgca

SEQ ID NO: 3710 - DNA, 21 bp, synthetic construct
  source 1..21: mol_type = other DNA
ggctcctccctagcctccgca

SEQ ID NO: 3711 - DNA, 21 bp, synthetic construct
  source 1..21: mol_type = other DNA
ggctcctcttttgcctccgca

SEQ ID NO: 3712 - DNA, 21 bp, synthetic construct
  source 1..21: mol_type = other DNA
caaaagccaagtggaccggga

SEQ ID NO: 3713 - DNA, 21 bp, synthetic construct
  source 1..21: mol_type = other DNA
caaaagcctagtggaccggga

SEQ ID NO: 3714 - DNA, 21 bp, synthetic construct
  source 1..21: mol_type = other DNA
caaaagcccagtggaccggga

SEQ ID NO: 3715 - DNA, 21 bp, synthetic construct
  source 1..21: mol_type = other DNA
caaaagccatgtggaccggga

SEQ ID NO: 3716 - DNA, 21 bp, synthetic construct
  source 1..21: mol_type = other DNA
caaaagccttgtggaccggga

SEQ ID NO: 3717 - DNA, 21 bp, synthetic construct
  source 1..21: mol_type = other DNA
caaaagccctgtggaccggga

SEQ ID NO: 3718 - DNA, 21 bp, synthetic construct
  source 1..21: mol_type = other DNA
caaaagccccgtggaccggga

SEQ ID NO: 3719 - DNA, 21 bp, synthetic construct
  source 1..21: mol_type = other DNA
caaaagccccggggaccggga

SEQ ID NO: 3720 - DNA, 21 bp, synthetic construct
  source 1..21: mol_type = other DNA
cacagcctaagaccgctcaag

SEQ ID NO: 3721 - DNA, 21 bp, synthetic construct
  source 1..21: mol_type = other DNA
cacagccttagaccgctcaag

SEQ ID NO: 3722 - DNA, 21 bp, synthetic construct
  source 1..21: mol_type = other DNA
cacagcctcagaccgctcaag

SEQ ID NO: 3723 - DNA, 21 bp, synthetic construct
  source 1..21: mol_type = other DNA
cacagcctatgaccgctcaag

SEQ ID NO: 3724 - DNA, 21 bp, synthetic construct
  source 1..21: mol_type = other DNA
cacagcctttgaccgctcaag

SEQ ID NO: 3725 - DNA, 21 bp, synthetic construct
  source 1..21: mol_type = other DNA
cacagcctctgaccgctcaag

SEQ ID NO: 3726 - DNA, 21 bp, synthetic construct
  source 1..21: mol_type = other DNA
cacagcctacgaccgctcaag

SEQ ID NO: 3727 - DNA, 21 bp, synthetic construct
  source 1..21: mol_type = other DNA
cacagcctccgtccgctcaag

SEQ ID NO: 3728 - DNA, 21 bp, synthetic construct
  source 1..21: mol_type = other DNA
tcaagcggaacagcagggcca

SEQ ID NO: 3729 - DNA, 21 bp, synthetic construct
  source 1..21: mol_type = other DNA
tcaagcggtacagcagggcca

SEQ ID NO: 3730 - DNA, 21 bp, synthetic construct
  source 1..21: mol_type = other DNA
tcaagcggcacagcagggcca

SEQ ID NO: 3731 - DNA, 21 bp, synthetic construct
  source 1..21: mol_type = other DNA
tcaagcggatcagcagggcca

SEQ ID NO: 3732 - DNA, 21 bp, synthetic construct
  source 1..21: mol_type = other DNA
tcaagcggttcagcagggcca

SEQ ID NO: 3733 - DNA, 21 bp, synthetic construct
  source 1..21: mol_type = other DNA
tcaagcggctcagcagggcca

SEQ ID NO: 3734 - DNA, 21 bp, synthetic construct
  source 1..21: mol_type = other DNA
tcaagcggaccagcagggcca

SEQ ID NO: 3735 - DNA, 21 bp, synthetic construct
  source 1..21: mol_type = other DNA
tcaagcggccctgcagggcca

SEQ ID NO: 3736 - DNA, 21 bp, synthetic construct
  source 1..21: mol_type = other DNA
tcagaatcataaggccaggca

SEQ ID NO: 3737 - DNA, 21 bp, synthetic construct
  source 1..21: mol_type = other DNA
tcagaatcttaaggccaggca

SEQ ID NO: 3738 - DNA, 21 bp, synthetic construct
  source 1..21: mol_type = other DNA
tcagaatcctaaggccaggca

SEQ ID NO: 3739 - DNA, 21 bp, synthetic construct
  source 1..21: mol_type = other DNA
tcagaatcacaaggccaggca

SEQ ID NO: 3740 - DNA, 21 bp, synthetic construct
  source 1..21: mol_type = other DNA
tcagaatctcaaggccaggca

SEQ ID NO: 3741 - DNA, 21 bp, synthetic construct
  source 1..21: mol_type = other DNA
tcagaatcccaaggccaggca

SEQ ID NO: 3742 - DNA, 21 bp, synthetic construct
  source 1..21: mol_type = other DNA
tcagaatcatatggccaggca

SEQ ID NO: 3743 - DNA, 21 bp, synthetic construct
  source 1..21: mol_type = other DNA
tcagaatcttatggccaggca

SEQ ID NO: 3744 - DNA, 21 bp, synthetic construct
  source 1..21: mol_type = other DNA
cagaatcgttgagccaggcac

SEQ ID NO: 3745 - DNA, 21 bp, synthetic construct
  source 1..21: mol_type = other DNA
cagaatcgctgagccaggcac

SEQ ID NO: 3746 - DNA, 21 bp, synthetic construct
  source 1..21: mol_type = other DNA
cagaatcgtcgagccaggcac

SEQ ID NO: 3747 - DNA, 21 bp, synthetic construct
  source 1..21: mol_type = other DNA
cagaatcgccgagccaggcac

SEQ ID NO: 3748 - DNA, 21 bp, synthetic construct
  source 1..21: mol_type = other DNA
cagaatcgttgtgccaggcac

SEQ ID NO: 3749 - DNA, 21 bp, synthetic construct
  source 1..21: mol_type = other DNA
cagaatcgctgtgccaggcac

SEQ ID NO: 3750 - DNA, 21 bp, synthetic construct
  source 1..21: mol_type = other DNA
cagaatcgtcgtgccaggcac

SEQ ID NO: 3751 - DNA, 21 bp, synthetic construct
  source 1..21: mol_type = other DNA
cagaatcgccgtgccaggcac

SEQ ID NO: 3752 - DNA, 21 bp, synthetic construct
  source 1..21: mol_type = other DNA
agaatcgatagaccaggcacc

SEQ ID NO: 3753 - DNA, 21 bp, synthetic construct
  source 1..21: mol_type = other DNA
agaatcgacagaccaggcacc

SEQ ID NO: 3754 - DNA, 21 bp, synthetic construct
  source 1..21: mol_type = other DNA
agaatcgattgaccaggcacc

SEQ ID NO: 3755 - DNA, 21 bp, synthetic construct
  source 1..21: mol_type = other DNA
agaatcgactgaccaggcacc

SEQ ID NO: 3756 - DNA, 21 bp, synthetic construct
  source 1..21: mol_type = other DNA
agaatcgatcgaccaggcacc

SEQ ID NO: 3757 - DNA, 21 bp, synthetic construct
  source 1..21: mol_type = other DNA
agaatcgaccgaccaggcacc

SEQ ID NO: 3758 - DNA, 21 bp, synthetic construct
  source 1..21: mol_type = other DNA
agaatcgatagtccaggcacc

SEQ ID NO: 3759 - DNA, 21 bp, synthetic construct
  source 1..21: mol_type = other DNA
agaatcgacagtccaggcacc

SEQ ID NO: 3760 - DNA, 21 bp, synthetic construct
  source 1..21: mol_type = other DNA
gaatcgaaaagacaggcaccc

SEQ ID NO: 3761 - DNA, 21 bp, synthetic construct
  source 1..21: mol_type = other DNA
gaatcgaatagacaggcaccc

SEQ ID NO: 3762 - DNA, 21 bp, synthetic construct
  source 1..21: mol_type = other DNA
gaatcgaacagacaggcaccc

SEQ ID NO: 3763 - DNA, 21 bp, synthetic construct
  source 1..21: mol_type = other DNA
gaatcgaaatgacaggcaccc

SEQ ID NO: 3764 - DNA, 21 bp, synthetic construct
  source 1..21: mol_type = other DNA
gaatcgaattgacaggcaccc

SEQ ID NO: 3765 - DNA, 21 bp, synthetic construct
  source 1..21: mol_type = other DNA
gaatcgaactgacaggcaccc

SEQ ID NO: 3766 - DNA, 21 bp, synthetic construct
  source 1..21: mol_type = other DNA
gaatcgaaacgacaggcaccc

SEQ ID NO: 3767 - DNA, 21 bp, synthetic construct
  source 1..21: mol_type = other DNA
gaatcgaatcgacaggcaccc

SEQ ID NO: 3768 - DNA, 21 bp, synthetic construct
  source 1..21: mol_type = other DNA
aatcgaagaacaaggcacccg

SEQ ID NO: 3769 - DNA, 21 bp, synthetic construct
  source 1..21: mol_type = other DNA
aatcgaagtacaaggcacccg

SEQ ID NO: 3770 - DNA, 21 bp, synthetic construct
  source 1..21: mol_type = other DNA
aatcgaagcacaaggcacccg

SEQ ID NO: 3771 - DNA, 21 bp, synthetic construct
  source 1..21: mol_type = other DNA
aatcgaagatcaaggcacccg

SEQ ID NO: 3772 - DNA, 21 bp, synthetic construct
  source 1..21: mol_type = other DNA
aatcgaagttcaaggcacccg

SEQ ID NO: 3773 - DNA, 21 bp, synthetic construct
  source 1..21: mol_type = other DNA
aatcgaagctcaaggcacccg

SEQ ID NO: 3774 - DNA, 21 bp, synthetic construct
  source 1..21: mol_type = other DNA
aatcgaagaccaaggcacccg

SEQ ID NO: 3775 - DNA, 21 bp, synthetic construct
  source 1..21: mol_type = other DNA
aatcgaagtccaaggcacccg

SEQ ID NO: 3776 - DNA, 21 bp, synthetic construct
  source 1..21: mol_type = other DNA
atcgaaggaactggcacccgg

SEQ ID NO: 3777 - DNA, 21 bp, synthetic construct
  source 1..21: mol_type = other DNA
atcgaaggtactggcacccgg

SEQ ID NO: 3778 - DNA, 21 bp, synthetic construct
  source 1..21: mol_type = other DNA
atcgaaggcactggcacccgg

SEQ ID NO: 3779 - DNA, 21 bp, synthetic construct
  source 1..21: mol_type = other DNA
atcgaaggagctggcacccgg

SEQ ID NO: 3780 - DNA, 21 bp, synthetic construct
  source 1..21: mol_type = other DNA
atcgaaggtgctggcacccgg

SEQ ID NO: 3781 - DNA, 21 bp, synthetic construct
  source 1..21: mol_type = other DNA
atcgaaggcgctggcacccgg

SEQ ID NO: 3782 - DNA, 21 bp, synthetic construct
  source 1..21: mol_type = other DNA
atcgaaggaaccggcacccgg

SEQ ID NO: 3783 - DNA, 21 bp, synthetic construct
  source 1..21: mol_type = other DNA
atcgaaggtaccggcacccgg

SEQ ID NO: 3784 - DNA, 21 bp, synthetic construct
  source 1..21: mol_type = other DNA
tcgaagggaaaagcacccggg

SEQ ID NO: 3785 - DNA, 21 bp, synthetic construct
  source 1..21: mol_type = other DNA
tcgaaggggaaagcacccggg

SEQ ID NO: 3786 - DNA, 21 bp, synthetic construct
  source 1..21: mol_type = other DNA
tcgaagggagaagcacccggg

SEQ ID NO: 3787 - DNA, 21 bp, synthetic construct
  source 1..21: mol_type = other DNA
tcgaagggggaagcacccggg

SEQ ID NO: 3788 - DNA, 21 bp, synthetic construct
  source 1..21: mol_type = other DNA
tcgaagggaaatgcacccggg

SEQ ID NO: 3789 - DNA, 21 bp, synthetic construct
  source 1..21: mol_type = other DNA
tcgaaggggaatgcacccggg

SEQ ID NO: 3790 - DNA, 21 bp, synthetic construct
  source 1..21: mol_type = other DNA
tcgaagggagatgcacccggg

SEQ ID NO: 3791 - DNA, 21 bp, synthetic construct
  source 1..21: mol_type = other DNA
tcgaagggggatgcacccggg

SEQ ID NO: 3792 - DNA, 21 bp, synthetic construct
  source 1..21: mol_type = other DNA
cgaagggcatgacacccggga

SEQ ID NO: 3793 - DNA, 21 bp, synthetic construct
  source 1..21: mol_type = other DNA
cgaagggcgtgacacccggga

SEQ ID NO: 3794 - DNA, 21 bp, synthetic construct
  source 1..21: mol_type = other DNA
cgaagggcacgacacccggga

SEQ ID NO: 3795 - DNA, 21 bp, synthetic construct
  source 1..21: mol_type = other DNA
cgaagggcgcgacacccggga

SEQ ID NO: 3796 - DNA, 21 bp, synthetic construct
  source 1..21: mol_type = other DNA
cgaagggcatgtcacccggga

SEQ ID NO: 3797 - DNA, 21 bp, synthetic construct
  source 1..21: mol_type = other DNA
cgaagggcgtgtcacccggga

SEQ ID NO: 3798 - DNA, 21 bp, synthetic construct
  source 1..21: mol_type = other DNA
cgaagggcacgtcacccggga

SEQ ID NO: 3799 - DNA, 21 bp, synthetic construct
  source 1..21: mol_type = other DNA
cgaagggcgcgtcacccggga

SEQ ID NO: 3800 - DNA, 21 bp, synthetic construct
  source 1..21: mol_type = other DNA
gaagggcctagaacccgggac

SEQ ID NO: 3801 - DNA, 21 bp, synthetic construct
  source 1..21: mol_type = other DNA
gaagggcccagaacccgggac

SEQ ID NO: 3802 - DNA, 21 bp, synthetic construct
  source 1..21: mol_type = other DNA
gaagggccttgaacccgggac

SEQ ID NO: 3803 - DNA, 21 bp, synthetic construct
  source 1..21: mol_type = other DNA
gaagggccctgaacccgggac

SEQ ID NO: 3804 - DNA, 21 bp, synthetic construct
  source 1..21: mol_type = other DNA
gaagggcctcgaacccgggac

SEQ ID NO: 3805 - DNA, 21 bp, synthetic construct
  source 1..21: mol_type = other DNA
gaagggccccgaacccgggac

SEQ ID NO: 3806 - DNA, 21 bp, synthetic construct
  source 1..21: mol_type = other DNA
gaagggcctaggacccgggac

SEQ ID NO: 3807 - DNA, 21 bp, synthetic construct
  source 1..21: mol_type = other DNA
gaagggcccaggacccgggac

SEQ ID NO: 3808 - DNA, 21 bp, synthetic construct
  source 1..21: mol_type = other DNA
aagggccaaactcccgggaca

SEQ ID NO: 3809 - DNA, 21 bp, synthetic construct
  source 1..21: mol_type = other DNA
aagggccatactcccgggaca

SEQ ID NO: 3810 - DNA, 21 bp, synthetic construct
  source 1..21: mol_type = other DNA
aagggccacactcccgggaca

SEQ ID NO: 3811 - DNA, 21 bp, synthetic construct
  source 1..21: mol_type = other DNA
aagggccaatctcccgggaca

SEQ ID NO: 3812 - DNA, 21 bp, synthetic construct
  source 1..21: mol_type = other DNA
aagggccattctcccgggaca

SEQ ID NO: 3813 - DNA, 21 bp, synthetic construct
  source 1..21: mol_type = other DNA
aagggccactctcccgggaca

SEQ ID NO: 3814 - DNA, 21 bp, synthetic construct
  source 1..21: mol_type = other DNA
aagggccaacctcccgggaca

SEQ ID NO: 3815 - DNA, 21 bp, synthetic construct
  source 1..21: mol_type = other DNA
aagggccatcctcccgggaca

SEQ ID NO: 3816 - DNA, 21 bp, synthetic construct
  source 1..21: mol_type = other DNA
gggccaggatcacgggacagg

SEQ ID NO: 3817 - DNA, 21 bp, synthetic construct
  source 1..21: mol_type = other DNA
gggccagggtcacgggacagg

SEQ ID NO: 3818 - DNA, 21 bp, synthetic construct
  source 1..21: mol_type = other DNA
gggccaggaccacgggacagg

SEQ ID NO: 3819 - DNA, 21 bp, synthetic construct
  source 1..21: mol_type = other DNA
gggccagggccacgggacagg

SEQ ID NO: 3820 - DNA, 21 bp, synthetic construct
  source 1..21: mol_type = other DNA
gggccaggatcgcgggacagg

SEQ ID NO: 3821 - DNA, 21 bp, synthetic construct
  source 1..21: mol_type = other DNA
gggccagggtcgcgggacagg

SEQ ID NO: 3822 - DNA, 21 bp, synthetic construct
  source 1..21: mol_type = other DNA
gggccaggaccgcgggacagg

SEQ ID NO: 3823 - DNA, 21 bp, synthetic construct
  source 1..21: mol_type = other DNA
gggccagggccgcgggacagg

SEQ ID NO: 3824 - DNA, 21 bp, synthetic construct
  source 1..21: mol_type = other DNA
ggccaggctacagggacaggg

SEQ ID NO: 3825 - DNA, 21 bp, synthetic construct
  source 1..21: mol_type = other DNA
ggccaggccacagggacaggg

SEQ ID NO: 3826 - DNA, 21 bp, synthetic construct
  source 1..21: mol_type = other DNA
ggccaggctgcagggacaggg

SEQ ID NO: 3827 - DNA, 21 bp, synthetic construct
  source 1..21: mol_type = other DNA
ggccaggccgcagggacaggg

SEQ ID NO: 3828 - DNA, 21 bp, synthetic construct
  source 1..21: mol_type = other DNA
ggccaggctacggggacaggg

SEQ ID NO: 3829 - DNA, 21 bp, synthetic construct
  source 1..21: mol_type = other DNA
ggccaggccacggggacaggg

SEQ ID NO: 3830 - DNA, 21 bp, synthetic construct
  source 1..21: mol_type = other DNA
ggccaggctgcggggacaggg

SEQ ID NO: 3831 - DNA, 21 bp, synthetic construct
  source 1..21: mol_type = other DNA
ggccaggccgcggggacaggg

SEQ ID NO: 3832 - DNA, 21 bp, synthetic construct
  source 1..21: mol_type = other DNA
gccaggcaaacaggacagggt

SEQ ID NO: 3833 - DNA, 21 bp, synthetic construct
  source 1..21: mol_type = other DNA
gccaggcagacaggacagggt

SEQ ID NO: 3834 - DNA, 21 bp, synthetic construct
  source 1..21: mol_type = other DNA
gccaggcaagcaggacagggt

SEQ ID NO: 3835 - DNA, 21 bp, synthetic construct
  source 1..21: mol_type = other DNA
gccaggcaggcaggacagggt

SEQ ID NO: 3836 - DNA, 21 bp, synthetic construct
  source 1..21: mol_type = other DNA
gccaggcaaactggacagggt

SEQ ID NO: 3837 - DNA, 21 bp, synthetic construct
  source 1..21: mol_type = other DNA
gccaggcagactggacagggt

SEQ ID NO: 3838 - DNA, 21 bp, synthetic construct
  source 1..21: mol_type = other DNA
gccaggcaagctggacagggt

SEQ ID NO: 3839 - DNA, 21 bp, synthetic construct
  source 1..21: mol_type = other DNA
gccaggcaggctggacagggt

SEQ ID NO: 3840 - DNA, 21 bp, synthetic construct
  source 1..21: mol_type = other DNA
ccaggcacaagagacagggtg

SEQ ID NO: 3841 - DNA, 21 bp, synthetic construct
  source 1..21: mol_type = other DNA
ccaggcacgagagacagggtg

SEQ ID NO: 3842 - DNA, 21 bp, synthetic construct
  source 1..21: mol_type = other DNA
ccaggcacaggagacagggtg

SEQ ID NO: 3843 - DNA, 21 bp, synthetic construct
  source 1..21: mol_type = other DNA
ccaggcacgggagacagggtg

SEQ ID NO: 3844 - DNA, 21 bp, synthetic construct
  source 1..21: mol_type = other DNA
ccaggcacaagtgacagggtg

SEQ ID NO: 3845 - DNA, 21 bp, synthetic construct
  source 1..21: mol_type = other DNA
ccaggcacgagtgacagggtg

SEQ ID NO: 3846 - DNA, 21 bp, synthetic construct
  source 1..21: mol_type = other DNA
ccaggcacaggtgacagggtg

SEQ ID NO: 3847 - DNA, 21 bp, synthetic construct
  source 1..21: mol_type = other DNA
ccaggcacgggtgacagggtg

SEQ ID NO: 3848 - DNA, 21 bp, synthetic construct
  source 1..21: mol_type = other DNA
caggcaccaagaacagggtgg

SEQ ID NO: 3849 - DNA, 21 bp, synthetic construct
  source 1..21: mol_type = other DNA
caggcaccgagaacagggtgg

SEQ ID NO: 3850 - DNA, 21 bp, synthetic construct
  source 1..21: mol_type = other DNA
caggcaccatgaacagggtgg

SEQ ID NO: 3851 - DNA, 21 bp, synthetic construct
  source 1..21: mol_type = other DNA
caggcaccgtgaacagggtgg

SEQ ID NO: 3852 - DNA, 21 bp, synthetic construct
  source 1..21: mol_type = other DNA
caggcaccacgaacagggtgg

SEQ ID NO: 3853 - DNA, 21 bp, synthetic construct
  source 1..21: mol_type = other DNA
caggcaccgcgaacagggtgg

SEQ ID NO: 3854 - DNA, 21 bp, synthetic construct
  source 1..21: mol_type = other DNA
caggcaccaagtacagggtgg

SEQ ID NO: 3855 - DNA, 21 bp, synthetic construct
  source 1..21: mol_type = other DNA
caggcaccgagtacagggtgg

SEQ ID NO: 3856 - DNA, 21 bp, synthetic construct
  source 1..21: mol_type = other DNA
aggcacccaagtcagggtggc

SEQ ID NO: 3857 - DNA, 21 bp, synthetic construct
  source 1..21: mol_type = other DNA
aggcaccctagtcagggtggc

SEQ ID NO: 3858 - DNA, 21 bp, synthetic construct
  source 1..21: mol_type = other DNA
aggcaccccagtcagggtggc

SEQ ID NO: 3859 - DNA, 21 bp, synthetic construct
  source 1..21: mol_type = other DNA
aggcacccatgtcagggtggc

SEQ ID NO: 3860 - DNA, 21 bp, synthetic construct
  source 1..21: mol_type = other DNA
aggcacccttgtcagggtggc

SEQ ID NO: 3861 - DNA, 21 bp, synthetic construct
  source 1..21: mol_type = other DNA
aggcacccctgtcagggtggc

SEQ ID NO: 3862 - DNA, 21 bp, synthetic construct
  source 1..21: mol_type = other DNA
aggcacccacgtcagggtggc

SEQ ID NO: 3863 - DNA, 21 bp, synthetic construct
  source 1..21: mol_type = other DNA
aggcaccctcgtcagggtggc

SEQ ID NO: 3864 - DNA, 21 bp, synthetic construct
  source 1..21: mol_type = other DNA
ggcacccgaaaaagggtggca

SEQ ID NO: 3865 - DNA, 21 bp, synthetic construct
  source 1..21: mol_type = other DNA
ggcacccgtaaaagggtggca

SEQ ID NO: 3866 - DNA, 21 bp, synthetic construct
  source 1..21: mol_type = other DNA
ggcacccgcaaaagggtggca

SEQ ID NO: 3867 - DNA, 21 bp, synthetic construct
  source 1..21: mol_type = other DNA
ggcacccgataaagggtggca

SEQ ID NO: 3868 - DNA, 21 bp, synthetic construct
  source 1..21: mol_type = other DNA
ggcacccgttaaagggtggca

SEQ ID NO: 3869 - DNA, 21 bp, synthetic construct
  source 1..21: mol_type = other DNA
ggcacccgctaaagggtggca

SEQ ID NO: 3870 - DNA, 21 bp, synthetic construct
  source 1..21: mol_type = other DNA
ggcacccgacaaagggtggca

SEQ ID NO: 3871 - DNA, 21 bp, synthetic construct
  source 1..21: mol_type = other DNA
ggcacccgtcaaagggtggca

SEQ ID NO: 3872 - DNA, 21 bp, synthetic construct
  source 1..21: mol_type = other DNA
gcacccggatctgggtggcag

SEQ ID NO: 3873 - DNA, 21 bp, synthetic construct
  source 1..21: mol_type = other DNA
gcacccggttctgggtggcag

SEQ ID NO: 3874 - DNA, 21 bp, synthetic construct
  source 1..21: mol_type = other DNA
gcacccggctctgggtggcag

SEQ ID NO: 3875 - DNA, 21 bp, synthetic construct
  source 1..21: mol_type = other DNA
gcacccggacctgggtggcag

SEQ ID NO: 3876 - DNA, 21 bp, synthetic construct
  source 1..21: mol_type = other DNA
gcacccggtcctgggtggcag

SEQ ID NO: 3877 - DNA, 21 bp, synthetic construct
  source 1..21: mol_type = other DNA
gcacccggccctgggtggcag

SEQ ID NO: 3878 - DNA, 21 bp, synthetic construct
  source 1..21: mol_type = other DNA
gcacccggatccgggtggcag

SEQ ID NO: 3879 - DNA, 21 bp, synthetic construct
  source 1..21: mol_type = other DNA
gcacccggttccgggtggcag

SEQ ID NO: 3880 - DNA, 21 bp, synthetic construct
  source 1..21: mol_type = other DNA
cacccgggtaaaggtggcagg

SEQ ID NO: 3881 - DNA, 21 bp, synthetic construct
  source 1..21: mol_type = other DNA
cacccgggcaaaggtggcagg

SEQ ID NO: 3882 - DNA, 21 bp, synthetic construct
  source 1..21: mol_type = other DNA
cacccgggtgaaggtggcagg

SEQ ID NO: 3883 - DNA, 21 bp, synthetic construct
  source 1..21: mol_type = other DNA
cacccgggcgaaggtggcagg

SEQ ID NO: 3884 - DNA, 21 bp, synthetic construct
  source 1..21: mol_type = other DNA
cacccgggtaatggtggcagg

SEQ ID NO: 3885 - DNA, 21 bp, synthetic construct
  source 1..21: mol_type = other DNA
cacccgggcaatggtggcagg

SEQ ID NO: 3886 - DNA, 21 bp, synthetic construct
  source 1..21: mol_type = other DNA
cacccgggtgatggtggcagg

SEQ ID NO: 3887 - DNA, 21 bp, synthetic construct
  source 1..21: mol_type = other DNA
cacccgggcgatggtggcagg

SEQ ID NO: 3888 - DNA, 21 bp, synthetic construct
  source 1..21: mol_type = other DNA
cccgggactagatggcagggc

SEQ ID NO: 3889 - DNA, 21 bp, synthetic construct
  source 1..21: mol_type = other DNA
cccgggaccagatggcagggc

SEQ ID NO: 3890 - DNA, 21 bp, synthetic construct
  source 1..21: mol_type = other DNA
cccgggacttgatggcagggc

SEQ ID NO: 3891 - DNA, 21 bp, synthetic construct
  source 1..21: mol_type = other DNA
cccgggacctgatggcagggc

SEQ ID NO: 3892 - DNA, 21 bp, synthetic construct
  source 1..21: mol_type = other DNA
cccgggactcgatggcagggc

SEQ ID NO: 3893 - DNA, 21 bp, synthetic construct
  source 1..21: mol_type = other DNA
cccgggacccgatggcagggc

SEQ ID NO: 3894 - DNA, 21 bp, synthetic construct
  source 1..21: mol_type = other DNA
cccgggactagttggcagggc

SEQ ID NO: 3895 - DNA, 21 bp, synthetic construct
  source 1..21: mol_type = other DNA
cccgggaccagttggcagggc

SEQ ID NO: 3896 - DNA, 21 bp, synthetic construct
  source 1..21: mol_type = other DNA
ccgggacaaagaggcagggcg

SEQ ID NO: 3897 - DNA, 21 bp, synthetic construct
  source 1..21: mol_type = other DNA
ccgggacatagaggcagggcg

SEQ ID NO: 3898 - DNA, 21 bp, synthetic construct
  source 1..21: mol_type = other DNA
ccgggacacagaggcagggcg

SEQ ID NO: 3899 - DNA, 21 bp, synthetic construct
  source 1..21: mol_type = other DNA
ccgggacaatgaggcagggcg

SEQ ID NO: 3900 - DNA, 21 bp, synthetic construct
  source 1..21: mol_type = other DNA
ccgggacattgaggcagggcg

SEQ ID NO: 3901 - DNA, 21 bp, synthetic construct
  source 1..21: mol_type = other DNA
ccgggacactgaggcagggcg

SEQ ID NO: 3902 - DNA, 21 bp, synthetic construct
  source 1..21: mol_type = other DNA
ccgggacaacgaggcagggcg

SEQ ID NO: 3903 - DNA, 21 bp, synthetic construct
  source 1..21: mol_type = other DNA
ccgggacatcgaggcagggcg

SEQ ID NO: 3904 - DNA, 21 bp, synthetic construct
  source 1..21: mol_type = other DNA
cgggacagaatagcagggcgc

SEQ ID NO: 3905 - DNA, 21 bp, synthetic construct
  source 1..21: mol_type = other DNA
cgggacagtatagcagggcgc

SEQ ID NO: 3906 - DNA, 21 bp, synthetic construct
  source 1..21: mol_type = other DNA
cgggacagcatagcagggcgc

SEQ ID NO: 3907 - DNA, 21 bp, synthetic construct
  source 1..21: mol_type = other DNA
cgggacagattagcagggcgc

SEQ ID NO: 3908 - DNA, 21 bp, synthetic construct
  source 1..21: mol_type = other DNA
cgggacagtttagcagggcgc

SEQ ID NO: 3909 - DNA, 21 bp, synthetic construct
  source 1..21: mol_type = other DNA
cgggacagcttagcagggcgc

SEQ ID NO: 3910 - DNA, 21 bp, synthetic construct
  source 1..21: mol_type = other DNA
cgggacagactagcagggcgc

SEQ ID NO: 3911 - DNA, 21 bp, synthetic construct
  source 1..21: mol_type = other DNA
cgggacagtctagcagggcgc

SEQ ID NO: 3912 - DNA, 21 bp, synthetic construct
  source 1..21: mol_type = other DNA
gggacaggaagacagggcgcc

SEQ ID NO: 3913 - DNA, 21 bp, synthetic construct
  source 1..21: mol_type = other DNA
gggacaggtagacagggcgcc

SEQ ID NO: 3914 - DNA, 21 bp, synthetic construct
  source 1..21: mol_type = other DNA
gggacaggcagacagggcgcc

SEQ ID NO: 3915 - DNA, 21 bp, synthetic construct
  source 1..21: mol_type = other DNA
gggacaggacgacagggcgcc

SEQ ID NO: 3916 - DNA, 21 bp, synthetic construct
  source 1..21: mol_type = other DNA
gggacaggtcgacagggcgcc

SEQ ID NO: 3917 - DNA, 21 bp, synthetic construct
  source 1..21: mol_type = other DNA
gggacaggccgacagggcgcc

SEQ ID NO: 3918 - DNA, 21 bp, synthetic construct
  source 1..21: mol_type = other DNA
gggacaggaggacagggcgcc

SEQ ID NO: 3919 - DNA, 21 bp, synthetic construct
  source 1..21: mol_type = other DNA
gggacaggtggacagggcgcc

SEQ ID NO: 3920 - DNA, 21 bp, synthetic construct
  source 1..21: mol_type = other DNA
agatctggagtaagaatcgaa

SEQ ID NO: 3921 - DNA, 22 bp, synthetic construct
  source 1..22: mol_type = other DNA
caacaaaatcactgatgctgga

SEQ ID NO: 3922 - DNA, 23 bp, synthetic construct
  source 1..23: mol_type = other DNA
cggcctgattcacaacaccagct

SEQ ID NO: 3923 - DNA, 23 bp, synthetic construct
  source 1..23: mol_type = other DNA
tcatacagctagataaccaaaga

SEQ ID NO: 3924 - DNA, 23 bp, synthetic construct
  source 1..23: mol_type = other DNA
gaaacccagcagacaatgtagct

SEQ ID NO: 3925 - DNA, 21 bp, synthetic construct
  source 1..21: mol_type = other DNA
aaacatcactgcaagtcttaa

SEQ ID NO: 3926 - DNA, 771 bp, synthetic construct
  source 1..771: mol_type = other DNA
ggaagagaaggtgacccttacccagttgttcaactcacccttcagattaaaaataactaaggtaagggcctgggtaggggaggtggtgtgagagggtcctgtctctcctctatctgcccatcggccctttggggaggaggaatgtgcccaaggactaaaaaaaggccctggagccagaggggcgagggcagcagacctttcatgggcaaacctcagggctgctggccactacgggtctaggctgcccatgtaaggaggcaaggcctggggacacccgagatgcctggttataattaacccagacatgtggctgcccccccccccccaacacctgctgcctgctaaaaataaccctgtccctggtggatatcaaggctgtgggggactgagggcaggctgtaacaggcttgggggccagggcttatacgtgcctgggactcccaaagtattactgttccatgttcccggcgaagggccagctgtcccccgccagctagactcagcacttagtttaggaaccagtgagcaagtcagcccttggggcagcccatacaaggccatggggctgggcaagctgcacgcctgggtccggggtgggcacggtgcccgggcaacgagctgaaagctcatctactctcaggggcccctccctggggacagcccctcctggctagtcacaccctgtaggctcctctatataacccaggggcacaggggctgccctcattctaccaccacctccacagcacagacagacactcacgagccagc

SEQ ID NO: 3927 - DNA, 781 bp, synthetic construct
  source 1..781: mol_type = other DNA
gtagctttagccggcttgcttgcttttggagtctgcccctcgtatgtacagatcggggtcagcctgagacgtgggcgggttccttcccaggcgttgcagctctctttcctccctcactctccagttcctctggctcagtgagggatttgggatttctgtgtgtggggcatggacagatactactcttagtgaaaagctggacaaggtggagtagagcatcaagggtgagtgccactacgggtctaggctgcccatgtaaggaggcaaggcctggggacacccgagatgcctggttataattaacccagacatgtggctgcccccccccccccaacacctgctgcctgctaaaaataaccctgtccctggtggatatcaaggctgtgggggactgagggcaggctgtaacaggcttgggggccagggcttatacgtgcctgggactcccaaagtattactgttccatgttcccggcgaagggccagctgtcccccgccagctagactcagcacttagtttaggaaccagtgagcaagtcagcccttggggcagcccatacaaggccatggggctgggcaagctgcacgcctgggtccggggtgggcacggtgcccgggcaacgagctgaaagctcatctactctcaggggcccctccctggggacagcccctcctggctagtcacaccctgtaggctcctctatataacccaggggcacaggggctgccctcattctaccaccacctccacagcacagacagacactcaggagccagccagc

SEQ ID NO: 3928 - DNA, 800 bp, synthetic construct
  source 1..800: mol_type = other DNA
cccctgacctttgcggtggaaatcctgagcccaggctgagatgagctcagctgatccttctctcagagacagctggagtacagtgctgctcagcccccagctcctgagtgtctggagcaaacagctgggagagaggtagaattcactcctggattagagccaaaaactgcctggcagaaacccccaggatcctgtttctcctgagggaggagcgggggagcccgggggcgagaaacccacagcacagggaagggaagggcagccttgaaactgcaagttgggagatcacggtttcctcacgtggccaccatgagggctgaggctgtaggctggccgctcctgcccctcccgaccaccccctcaggcttccagcctccttgctcagccacctaggctgggctttcaggttcacaggcagccggccctacaacatggaggcccaggctgggctttcttcaggagtggcatctaaacttaggagaggggaacacgtttcacccgaatctgggctagcagtgtgttggttaaatggcccctgagtaggtgtggggcatggcagaggtgcaggagtgggtgtccgaggatgcagccaactcatctccaaacagctccttttcttttccccagtgggctgcattcccagactggtattttagttggtgtgacagagtcccagagtcatctggcccaggggcttgcacctgcgccagtccttccctgtccacccctgcccgtctccaggcgctcctataaagggctgagcagttcagctcttctcactggggggtgtgaggaacagg

SEQ ID NO: 3929 - DNA, 107 bp, synthetic construct
  source 1..107: mol_type = other DNA
ggaccacccagcagtgatgcacgtagagcagaggtgcagtgatgcacgtacagcagaggcgaccccttctccatacttcagagacctctagcatggtgttgtgggac

SEQ ID NO: 3930 - DNA, 15 bp, synthetic construct
  source 1..15: mol_type = other DNA
ttgccaatcagagaa

SEQ ID NO: 3931 - DNA, 102 bp, synthetic construct
  source 1..102: mol_type = other DNA
ccacactgcactgcaagcagcgagcagcaagcaacaagcatccagacacctgagcaccaggatgccagcaagagcacctgcctgtgaggaaacctcccagcc

SEQ ID NO: 3932 - DNA, 266 bp, synthetic construct
  source 1..266: mol_type = other DNA
  misc_difference 108: note = a, c, t, g, unknown or other
  misc_difference 109: note = a, c, t, g, unknown or other
  misc_difference 110: note = a, c, t, g, unknown or other
  misc_difference 111: note = a, c, t, g, unknown or other
  misc_difference 112: note = a, c, t, g, unknown or other
  misc_difference 113: note = a, c, t, g, unknown or other
  misc_difference 114: note = a, c, t, g, unknown or other
  misc_difference 115: note = a, c, t, g, unknown or other
  misc_difference 116: note = a, c, t, g, unknown or other
  misc_difference 117: note = a, c, t, g, unknown or other
  misc_difference 118: note = a, c, t, g, unknown or other
  misc_difference 119: note = a, c, t, g, unknown or other
  misc_difference 120: note = a, c, t, g, unknown or other
  misc_difference 121: note = a, c, t, g, unknown or other
  misc_difference 122: note = a, c, t, g, unknown or other
  misc_difference 123: note = a, c, t, g, unknown or other
  misc_difference 124: note = a, c, t, g, unknown or other
  misc_difference 125: note = a, c, t, g, unknown or other
  misc_difference 126: note = a, c, t, g, unknown or other
  misc_difference 127: note = a, c, t, g, unknown or other
  misc_difference 128: note = a, c, t, g, unknown or other
  misc_difference 144: note = a, c, t, g, unknown or other
  misc_difference 145: note = a, c, t, g, unknown or other
  misc_difference 146: note = a, c, t, g, unknown or other
  misc_difference 147: note = a, c, t, g, unknown or other
  misc_difference 148: note = a, c, t, g, unknown or other
  misc_difference 149: note = a, c, t, g, unknown or other
  misc_difference 150: note = a, c, t, g, unknown or other
  misc_difference 151: note = a, c, t, g, unknown or other
  misc_difference 152: note = a, c, t, g, unknown or other
  misc_difference 153: note = a, c, t, g, unknown or other
  misc_difference 154: note = a, c, t, g, unknown or other
  misc_difference 155: note = a, c, t, g, unknown or other
  misc_difference 156: note = a, c, t, g, unknown or other
  misc_difference 157: note = a, c, t, g, unknown or other
  misc_difference 158: note = a, c, t, g, unknown or other
  misc_difference 159: note = a, c, t, g, unknown or other
  misc_difference 160: note = a, c, t, g, unknown or other
  misc_difference 161: note = a, c, t, g, unknown or other
  misc_difference 162: note = a, c, t, g, unknown or other
  misc_difference 163: note = a, c, t, g, unknown or other
  misc_difference 164: note = a, c, t, g, unknown or other
ggaccacccagcagtgatgcacgtagagcagaggtgcagtgatgcacgtacagcagaggcgaccccttctccatacttcagagacctctagcatggtgttgtgggacnnnnnnnnnnnnnnnnnnnnnttgccaatcagagaannnnnnnnnnnnnnnnnnnnnccacactgcactgcaagcagcgagcagcaagcaacaagcatccagacacctgagcaccaggatgccagcaagagcacctgcctgtgaggaaacctcccagcc

SEQ ID NO: 3933 - DNA, 106 bp, synthetic construct
  source 1..106: mol_type = other DNA
ggggaccagctatggtaagggatgagagaagccaacagttgtcccaagggtccccctcagggagtggaggttcccctgggaggcgccaggacaggcgcaggtgtat

SEQ ID NO: 3934 - DNA, 14 bp, synthetic construct
  source 1..14: mol_type = other DNA
tgtggctcggaggc

SEQ ID NO: 3935 - DNA, 105 bp, synthetic construct
  source 1..105: mol_type = other DNA
taacaactgaagccagagtcttcgaagggtggtgggctaagggggaagagggcatggtgggcaaaagaaagggggtgggggagagagaaaaggaggacaaggggg

SEQ ID NO: 3936 - DNA, 267 bp, synthetic construct
  source 1..267: mol_type = other DNA
  misc_difference 107: note = a, c, t, g, unknown or other
  misc_difference 108: note = a, c, t, g, unknown or other
  misc_difference 109: note = a, c, t, g, unknown or other
  misc_difference 110: note = a, c, t, g, unknown or other
  misc_difference 111: note = a, c, t, g, unknown or other
  misc_difference 112: note = a, c, t, g, unknown or other
  misc_difference 113: note = a, c, t, g, unknown or other
  misc_difference 114: note = a, c, t, g, unknown or other
  misc_difference 115: note = a, c, t, g, unknown or other
  misc_difference 116: note = a, c, t, g, unknown or other
  misc_difference 117: note = a, c, t, g, unknown or other
  misc_difference 118: note = a, c, t, g, unknown or other
  misc_difference 119: note = a, c, t, g, unknown or other
  misc_difference 120: note = a, c, t, g, unknown or other
  misc_difference 121: note = a, c, t, g, unknown or other
  misc_difference 122: note = a, c, t, g, unknown or other
  misc_difference 123: note = a, c, t, g, unknown or other
  misc_difference 124: note = a, c, t, g, unknown or other
  misc_difference 125: note = a, c, t, g, unknown or other
  misc_difference 126: note = a, c, t, g, unknown or other
  misc_difference 127: note = a, c, t, g, unknown or other
  misc_difference 142: note = a, c, t, g, unknown or other
  misc_difference 143: note = a, c, t, g, unknown or other
  misc_difference 144: note = a, c, t, g, unknown or other
  misc_difference 145: note = a, c, t, g, unknown or other
  misc_difference 146: note = a, c, t, g, unknown or other
  misc_difference 147: note = a, c, t, g, unknown or other
  misc_difference 148: note = a, c, t, g, unknown or other
  misc_difference 149: note = a, c, t, g, unknown or other
  misc_difference 150: note = a, c, t, g, unknown or other
  misc_difference 151: note = a, c, t, g, unknown or other
  misc_difference 152: note = a, c, t, g, unknown or other
  misc_difference 153: note = a, c, t, g, unknown or other
  misc_difference 154: note = a, c, t, g, unknown or other
  misc_difference 155: note = a, c, t, g, unknown or other
  misc_difference 156: note = a, c, t, g, unknown or other
  misc_difference 157: note = a, c, t, g, unknown or other
  misc_difference 158: note = a, c, t, g, unknown or other
  misc_difference 159: note = a, c, t, g, unknown or other
  misc_difference 160: note = a, c, t, g, unknown or other
  misc_difference 161: note = a, c, t, g, unknown or other
  misc_difference 162: note = a, c, t, g, unknown or other
ggggaccagctatggtaagggatgagagaagccaacagttgtcccaagggtccccctcagggagtggaggttcccctgggaggcgccaggacaggcgcaggtgtatnnnnnnnnnnnnnnnnnnnnntgtggctcggaggcnnnnnnnnnnnnnnnnnnnnntaacaactgaagccagagtcttcgaagggtggtgggctaagggggaagagggcatggtgggcaaaagaaagggggtgggggagagagaaaaggaggacaaggggg

SEQ ID NO: 3937 - DNA, 107 bp, synthetic construct
  source 1..107: mol_type = other DNA
tctctgcgcgctcgctcgctcactgaggccgcccgggcaaagcccgggcgtcgggcgacctttggtcgcccggcctcagtgagcgagcgagcgcgcagagagggagt

SEQ ID NO: 3938 - DNA, 232 bp, synthetic construct
  source 1..232: mol_type = other DNA
ctagagctcgctgatcagcctcgactgtgccttctagttgccagccatctgttgtttgcccctcccccgtgccttccttgaccctggaaggtgccactcccactgtcctttcctaataaaatgaggaaattgcatcgcattgtctgagtaggtgtcattctattctggggggtggggtggggcaggacagcaagggggaggattgggaagagaatagcaggcatgctgggga

SEQ ID NO: 3939 - DNA, 128 bp, synthetic construct
  source 1..128: mol_type = other DNA
aggaacccctagtgatggagttggccactccctctctgcgcgctcgctcgctcactgaggccgggcgaccaaaggtcgcccgacgcccgggctttgcccgggcggcctcagtgagcgagcgagcgcgc

SEQ ID NO: 3940 - DNA, 1674 bp, synthetic construct
  source 1..1674: mol_type = other DNA
tctctgcgcgctcgctcgctcactgaggccgcccgggcaaagcccgggcgtcgggcgacctttggtcgcccggcctcagtgagcgagcgagcgcgcagagagggagtcatataacatgaagatcatctgaattcgtagctttagccggcttgcttgcttttggagtctgcccctcgtatgtacagatcggggtcagcctgagacgtgggcgggttccttcccaggcgttgcagctctctttcctccctcactctccagttcctctggctcagtgagggatttgggatttctgtgtgtggggcatggacagatactactcttagtgaaaagctggacaaggtggagtagagcatcaagggtgagtgccactacgggtctaggctgcccatgtaaggaggcaaggcctggggacacccgagatgcctggttataattaacccagacatgtggctgcccccccccccccaacacctgctgcctgctaaaaataaccctgtccctggtggatatcaaggctgtgggggactgagggcaggctgtaacaggcttgggggccagggcttatacgtgcctgggactcccaaagtattactgttccatgttcccggcgaagggccagctgtcccccgccagctagactcagcacttagtttaggaaccagtgagcaagtcagcccttggggcagcccatacaaggccatggggctgggcaagctgcacgcctgggtccggggtgggcacggtgcccgggcaacgagctgaaagctcatctactctcaggggcccctccctggggacagcccctcctggctagtcacaccctgtaggctcctctatataacccaggggcacaggggctgccctcattctaccaccacctccacagcacagacagacactcaggagccagccagccatctactggggaccagctatggtaagggatgagagaagccaacagttgtcccaagggtccccctcagggagtggaggttcccctgggaggcgccaggacaggcgcaggtgtatccggtgtgggcgaaggcgacctgtggctcggaggcggtcgcctaaggccacaccggtaacaactgaagccagagtcttcgaagggtggtgggctaagggggaagagggcatggtgggcaaaagaaagggggtgggggagagagaaaaggaggacaagggggactactctcatacagctagataaccaaagaaatattcaaacatcactgcaagtcttaatgcttatcaacaaaatcactgatgctggaactctacgaaacccagcagacaatgtagctagaatatctagagctcgctgatcagcctcgactgtgccttctagttgccagccatctgttgtttgcccctcccccgtgccttccttgaccctggaaggtgccactcccactgtcctttcctaataaaatgaggaaattgcatcgcattgtctgagtaggtgtcattctattctggggggtggggtggggcaggacagcaagggggaggattgggaagagaatagcaggcatgctggggaaggaacccctagtgatggagttggccactccctctctgcgcgctcgctcgctcactgaggccgggcgaccaaaggtcgcccgacgcccgggctttgcccgggcggcctcagtgagcgagcgagcgcgc

SEQ ID NO: 3941 - DNA, 1665 bp, synthetic construct
  source 1..1665: mol_type = other DNA
tctctgcgcgctcgctcgctcactgaggccgcccgggcaaagcccgggcgtcgggcgacctttggtcgcccggcctcagtgagcgagcgagcgcgcagagagggagtcatataacatgaagatcatctgaattcggaagagaaggtgacccttacccagttgttcaactcacccttcagattaaaaataactaaggtaagggcctgggtaggggaggtggtgtgagagggtcctgtctctcctctatctgcccatcggccctttggggaggaggaatgtgcccaaggactaaaaaaaggccctggagccagaggggcgagggcagcagacctttcatgggcaaacctcagggctgctggccactacgggtctaggctgcccatgtaaggaggcaaggcctggggacacccgagatgcctggttataattaacccagacatgtggctgcccccccccccccaacacctgctgcctgctaaaaataaccctgtccctggtggatatcaaggctgtgggggactgagggcaggctgtaacaggcttgggggccagggcttatacgtgcctgggactcccaaagtattactgttccatgttcccggcgaagggccagctgtcccccgccagctagactcagcacttagtttaggaaccagtgagcaagtcagcccttggggcagcccatacaaggccatggggctgggcaagctgcacgcctgggtccggggtgggcacggtgcccgggcaacgagctgaaagctcatctactctcaggggcccctccctggggacagcccctcctggctagtcacaccctgtaggctcctctatataacccaggggcacaggggctgccctcattctaccaccacctccacagcacagacagacactcacgagccagccatctactggggaccagctatggtaagggatgagagaagccaacagttgtcccaagggtccccctcagggagtggaggttcccctgggaggcgccaggacaggcgcaggtgtatttcgattctgaaaccagatcttgtggctcggaggcagatctggagtaagaatcgaataacaactgaagccagagtcttcgaagggtggtgggctaagggggaagagggcatggtgggcaaaagaaagggggtgggggagagagaaaaggaggacaagggggactactccaacaaaatcactgatgctggaaatattcgaaacccagcagacaatgtagcttgcttatcaacaaaatcactgatgctggaactctacgaaacccagcagacaatgtagctagaatatctagagctcgctgatcagcctcgactgtgccttctagttgccagccatctgttgtttgcccctcccccgtgccttccttgaccctggaaggtgccactcccactgtcctttcctaataaaatgaggaaattgcatcgcattgtctgagtaggtgtcattctattctggggggtggggtggggcaggacagcaagggggaggattgggaagagaatagcaggcatgctggggaaggaacccctagtgatggagttggccactccctctctgcgcgctcgctcgctcactgaggccgggcgaccaaaggtcgcccgacgcccgggctttgcccgggcggcctcagtgagcgagcgagcgcgc

SEQ ID NO: 3942 - DNA, 1692 bp, synthetic construct
  source 1..1692: mol_type = other DNA
tctctgcgcgctcgctcgctcactgaggccgcccgggcaaagcccgggcgtcgggcgacctttggtcgcccggcctcagtgagcgagcgagcgcgcagagagggagtcatataacatgaagatcatctgaattccccctgacctttgcggtggaaatcctgagcccaggctgagatgagctcagctgatccttctctcagagacagctggagtacagtgctgctcagcccccagctcctgagtgtctggagcaaacagctgggagagaggtagaattcactcctggattagagccaaaaactgcctggcagaaacccccaggatcctgtttctcctgagggaggagcgggggagcccgggggcgagaaacccacagcacagggaagggaagggcagccttgaaactgcaagttgggagatcacggtttcctcacgtggccaccatgagggctgaggctgtaggctggccgctcctgcccctcccgaccaccccctcaggcttccagcctccttgctcagccacctaggctgggctttcaggttcacaggcagccggccctacaacatggaggcccaggctgggctttcttcaggagtggcatctaaacttaggagaggggaacacgtttcacccgaatctgggctagcagtgtgttggttaaatggcccctgagtaggtgtggggcatggcagaggtgcaggagtgggtgtccgaggatgcagccaactcatctccaaacagctccttttcttttccccagtgggctgcattcccagactggtattttagttggtgtgacagagtcccagagtcatctggcccaggggcttgcacctgcgccagtccttccctgtccacccctgcccgtctccaggcgctcctataaagggctgagcagttcagctcttctcactggggggtgtgaggaacaggcatctactggaccacccagcagtgatgcacgtagagcagaggtgcagtgatgcacgtacagcagaggcgaccccttctccatacttcagagacctctagcatggtgttgtgggactgtcccgggtgcctggcccttttgccaatcagagaaaagggccaaactcccgggacaccacactgcactgcaagcagcgagcagcaagcaacaagcatccagacacctgagcaccaggatgccagcaagagcacctgcctgtgaggaaacctcccagccactactccaacaaaatcactgatgctggaaatattcgaaacccagcagacaatgtagcttgcttatcggcctgattcacaacaccagctactctacaaacatcactgcaagtcttaaagaatatctagagctcgctgatcagcctcgactgtgccttctagttgccagccatctgttgtttgcccctcccccgtgccttccttgaccctggaaggtgccactcccactgtcctttcctaataaaatgaggaaattgcatcgcattgtctgagtaggtgtcattctattctggggggtggggtggggcaggacagcaagggggaggattgggaagagaatagcaggcatgctggggaaggaacccctagtgatggagttggccactccctctctgcgcgctcgctcgctcactgaggccgggcgaccaaaggtcgcccgacgcccgggctttgcccgggcggcctcagtgagcgagcgagcgcgc

SEQ ID NO: 3943 - DNA, 1661 bp, synthetic construct
  source 1..1661: mol_type = other DNA
tctctgcgcgctcgctcgctcactgaggccgcccgggcaaagcccgggcgtcgggcgacctttggtcgcccggcctcagtgagcgagcgagcgcgcagagagggagtcatataacatgaagatcatctgaattcggaagagaaggtgacccttacccagttgttcaactcacccttcagattaaaaataactaaggtaagggcctgggtaggggaggtggtgtgagagggtcctgtctctcctctatctgcccatcggccctttggggaggaggaatgtgcccaaggactaaaaaaaggccctggagccagaggggcgagggcagcagacctttcatgggcaaacctcagggctgctggccactacgggtctaggctgcccatgtaaggaggcaaggcctggggacacccgagatgcctggttataattaacccagacatgtggctgcccccccccccccaacacctgctgcctgctaaaaataaccctgtccctggtggatatcaaggctgtgggggactgagggcaggctgtaacaggcttgggggccagggcttatacgtgcctgggactcccaaagtattactgttccatgttcccggcgaagggccagctgtcccccgccagctagactcagcacttagtttaggaaccagtgagcaagtcagcccttggggcagcccatacaaggccatggggctgggcaagctgcacgcctgggtccggggtgggcacggtgcccgggcaacgagctgaaagctcatctactctcaggggcccctccctggggacagcccctcctggctagtcacaccctgtaggctcctctatataacccaggggcacaggggctgccctcattctaccaccacctccacagcacagacagacactcacgagccagccatctactggaccacccagcagtgatgcacgtagagcagaggtgcagtgatgcacgtacagcagaggcgaccccttctccatacttcagagacctctagcatggtgttgtgggactgtcccgggtgcctggcccttttgccaatcagagaaaagggccaaactcccgggacaccacactgcactgcaagcagcgagcagcaagcaacaagcatccagacacctgagcaccaggatgccagcaagagcacctgcctgtgaggaaacctcccagccactactccaacaaaatcactgatgctggaaatattcaaacatcactgcaagtcttaatgcttatcggcctgattcacaacaccagctactctacaaacatcactgcaagtcttaaagaatatctagagctcgctgatcagcctcgactgtgccttctagttgccagccatctgttgtttgcccctcccccgtgccttccttgaccctggaaggtgccactcccactgtcctttcctaataaaatgaggaaattgcatcgcattgtctgagtaggtgtcattctattctggggggtggggtggggcaggacagcaagggggaggattgggaagagaatagcaggcatgctggggaaggaacccctagtgatggagttggccactccctctctgcgcgctcgctcgctcactgaggccgggcgaccaaaggtcgcccgacgcccgggctttgcccgggcggcctcagtgagcgagcgagcgcgc

SEQ ID NO: 3944 - DNA, 1673 bp, synthetic construct
  source 1..1673: mol_type = other DNA
tctctgcgcgctcgctcgctcactgaggccgcccgggcaaagcccgggcgtcgggcgacctttggtcgcccggcctcagtgagcgagcgagcgcgcagagagggagtcatataacatgaagatcatctgaattcgtagctttagccggcttgcttgcttttggagtctgcccctcgtatgtacagatcggggtcagcctgagacgtgggcgggttccttcccaggcgttgcagctctctttcctccctcactctccagttcctctggctcagtgagggatttgggatttctgtgtgtggggcatggacagatactactcttagtgaaaagctggacaaggtggagtagagcatcaagggtgagtgccactacgggtctaggctgcccatgtaaggaggcaaggcctggggacacccgagatgcctggttataattaacccagacatgtggctgcccccccccccccaacacctgctgcctgctaaaaataaccctgtccctggtggatatcaaggctgtgggggactgagggcaggctgtaacaggcttgggggccagggcttatacgtgcctgggactcccaaagtattactgttccatgttcccggcgaagggccagctgtcccccgccagctagactcagcacttagtttaggaaccagtgagcaagtcagcccttggggcagcccatacaaggccatggggctgggcaagctgcacgcctgggtccggggtgggcacggtgcccgggcaacgagctgaaagctcatctactctcaggggcccctccctggggacagcccctcctggctagtcacaccctgtaggctcctctatataacccaggggcacaggggctgccctcattctaccaccacctccacagcacagacagacactcaggagccagccagccatctactggaccacccagcagtgatgcacgtagagcagaggtgcagtgatgcacgtacagcagaggcgaccccttctccatacttcagagacctctagcatggtgttgtgggacccggtgtgggcgaaggcgaccttgccaatcagagaaggtcgcctaaggccacaccggccacactgcactgcaagcagcgagcagcaagcaacaagcatccagacacctgagcaccaggatgccagcaagagcacctgcctgtgaggaaacctcccagccactactccaacaaaatcactgatgctggaaatattcgaaacccagcagacaatgtagcttgcttatcggcctgattcacaacaccagctactctacaaacatcactgcaagtcttaaagaatatctagagctcgctgatcagcctcgactgtgccttctagttgccagccatctgttgtttgcccctcccccgtgccttccttgaccctggaaggtgccactcccactgtcctttcctaataaaatgaggaaattgcatcgcattgtctgagtaggtgtcattctattctggggggtggggtggggcaggacagcaagggggaggattgggaagagaatagcaggcatgctggggaaggaacccctagtgatggagttggccactccctctctgcgcgctcgctcgctcactgaggccgggcgaccaaaggtcgcccgacgcccgggctttgcccgggcggcctcagtgagcgagcgagcgcgc

SEQ ID NO: 3945 - DNA, 1665 bp, synthetic construct
  source 1..1665: mol_type = other DNA
tctctgcgcgctcgctcgctcactgaggccgcccgggcaaagcccgggcgtcgggcgacctttggtcgcccggcctcagtgagcgagcgagcgcgcagagagggagtcatataacatgaagatcatctgaattcggaagagaaggtgacccttacccagttgttcaactcacccttcagattaaaaataactaaggtaagggcctgggtaggggaggtggtgtgagagggtcctgtctctcctctatctgcccatcggccctttggggaggaggaatgtgcccaaggactaaaaaaaggccctggagccagaggggcgagggcagcagacctttcatgggcaaacctcagggctgctggccactacgggtctaggctgcccatgtaaggaggcaaggcctggggacacccgagatgcctggttataattaacccagacatgtggctgcccccccccccccaacacctgctgcctgctaaaaataaccctgtccctggtggatatcaaggctgtgggggactgagggcaggctgtaacaggcttgggggccagggcttatacgtgcctgggactcccaaagtattactgttccatgttcccggcgaagggccagctgtcccccgccagctagactcagcacttagtttaggaaccagtgagcaagtcagcccttggggcagcccatacaaggccatggggctgggcaagctgcacgcctgggtccggggtgggcacggtgcccgggcaacgagctgaaagctcatctactctcaggggcccctccctggggacagcccctcctggctagtcacaccctgtaggctcctctatataacccaggggcacaggggctgccctcattctaccaccacctccacagcacagacagacactcacgagccagccatctactggggaccagctatggtaagggatgagagaagccaacagttgtcccaagggtccccctcagggagtggaggttcccctgggaggcgccaggacaggcgcaggtgtatgaaaccagatctgaatcctggtgtggctcggaggcccaggattacgctctggtttctaacaactgaagccagagtcttcgaagggtggtgggctaagggggaagagggcatggtgggcaaaagaaagggggtgggggagagagaaaaggaggacaagggggactactccaacaaaatcactgatgctggaaatattcgaaacccagcagacaatgtagcttgcttatcaacaaaatcactgatgctggaactctacgaaacccagcagacaatgtagctagaatatctagagctcgctgatcagcctcgactgtgccttctagttgccagccatctgttgtttgcccctcccccgtgccttccttgaccctggaaggtgccactcccactgtcctttcctaataaaatgaggaaattgcatcgcattgtctgagtaggtgtcattctattctggggggtggggtggggcaggacagcaagggggaggattgggaagagaatagcaggcatgctggggaaggaacccctagtgatggagttggccactccctctctgcgcgctcgctcgctcactgaggccgggcgaccaaaggtcgcccgacgcccgggctttgcccgggcggcctcagtgagcgagcgagcgcgc

SEQ ID NO: 3946 - DNA, 1674 bp, synthetic construct
  source 1..1674: mol_type = other DNA
tctctgcgcgctcgctcgctcactgaggccgcccgggcaaagcccgggcgtcgggcgacctttggtcgcccggcctcagtgagcgagcgagcgcgcagagagggagtcatataacatgaagatcatctgaattcgtagctttagccggcttgcttgcttttggagtctgcccctcgtatgtacagatcggggtcagcctgagacgtgggcgggttccttcccaggcgttgcagctctctttcctccctcactctccagttcctctggctcagtgagggatttgggatttctgtgtgtggggcatggacagatactactcttagtgaaaagctggacaaggtggagtagagcatcaagggtgagtgccactacgggtctaggctgcccatgtaaggaggcaaggcctggggacacccgagatgcctggttataattaacccagacatgtggctgcccccccccccccaacacctgctgcctgctaaaaataaccctgtccctggtggatatcaaggctgtgggggactgagggcaggctgtaacaggcttgggggccagggcttatacgtgcctgggactcccaaagtattactgttccatgttcccggcgaagggccagctgtcccccgccagctagactcagcacttagtttaggaaccagtgagcaagtcagcccttggggcagcccatacaaggccatggggctgggcaagctgcacgcctgggtccggggtgggcacggtgcccgggcaacgagctgaaagctcatctactctcaggggcccctccctggggacagcccctcctggctagtcacaccctgtaggctcctctatataacccaggggcacaggggctgccctcattctaccaccacctccacagcacagacagacactcaggagccagccagccatctactggggaccagctatggtaagggatgagagaagccaacagttgtcccaagggtccccctcagggagtggaggttcccctgggaggcgccaggacaggcgcaggtgtatggccttctggcgggccgcgtctgtggctcggaggcgacgcggcagggcagaaggcctaacaactgaagccagagtcttcgaagggtggtgggctaagggggaagagggcatggtgggcaaaagaaagggggtgggggagagagaaaaggaggacaagggggactactctcatacagctagataaccaaagaaatattcgaaacccagcagacaatgtagcttgcttatcaacaaaatcactgatgctggaactctacaaacatcactgcaagtcttaaagaatatctagagctcgctgatcagcctcgactgtgccttctagttgccagccatctgttgtttgcccctcccccgtgccttccttgaccctggaaggtgccactcccactgtcctttcctaataaaatgaggaaattgcatcgcattgtctgagtaggtgtcattctattctggggggtggggtggggcaggacagcaagggggaggattgggaagagaatagcaggcatgctggggaaggaacccctagtgatggagttggccactccctctctgcgcgctcgctcgctcactgaggccgggcgaccaaaggtcgcccgacgcccgggctttgcccgggcggcctcagtgagcgagcgagcgcgc

SEQ ID NO: 3947 - DNA, 1673 bp, synthetic construct
  source 1..1673: mol_type = other DNA
tctctgcgcgctcgctcgctcactgaggccgcccgggcaaagcccgggcgtcgggcgacctttggtcgcccggcctcagtgagcgagcgagcgcgcagagagggagtcatataacatgaagatcatctgaattcgtagctttagccggcttgcttgcttttggagtctgcccctcgtatgtacagatcggggtcagcctgagacgtgggcgggttccttcccaggcgttgcagctctctttcctccctcactctccagttcctctggctcagtgagggatttgggatttctgtgtgtggggcatggacagatactactcttagtgaaaagctggacaaggtggagtagagcatcaagggtgagtgccactacgggtctaggctgcccatgtaaggaggcaaggcctggggacacccgagatgcctggttataattaacccagacatgtggctgcccccccccccccaacacctgctgcctgctaaaaataaccctgtccctggtggatatcaaggctgtgggggactgagggcaggctgtaacaggcttgggggccagggcttatacgtgcctgggactcccaaagtattactgttccatgttcccggcgaagggccagctgtcccccgccagctagactcagcacttagtttaggaaccagtgagcaagtcagcccttggggcagcccatacaaggccatggggctgggcaagctgcacgcctgggtccggggtgggcacggtgcccgggcaacgagctgaaagctcatctactctcaggggcccctccctggggacagcccctcctggctagtcacaccctgtaggctcctctatataacccaggggcacaggggctgccctcattctaccaccacctccacagcacagacagacactcaggagccagccagccatctactggaccacccagcagtgatgcacgtagagcagaggtgcagtgatgcacgtacagcagaggcgaccccttctccatacttcagagacctctagcatggtgttgtgggacccggtgtgggcgaaggcgaccttgccaatcagagaaggtcgcctaaggccacaccggccacactgcactgcaagcagcgagcagcaagcaacaagcatccagacacctgagcaccaggatgccagcaagagcacctgcctgtgaggaaacctcccagccactactctcatacagctagataaccaaagaaatattcgaaacccagcagacaatgtagcttgcttatcaacaaaatcactgatgctggaactctacaaacatcactgcaagtcttaaagaatatctagagctcgctgatcagcctcgactgtgccttctagttgccagccatctgttgtttgcccctcccccgtgccttccttgaccctggaaggtgccactcccactgtcctttcctaataaaatgaggaaattgcatcgcattgtctgagtaggtgtcattctattctggggggtggggtggggcaggacagcaagggggaggattgggaagagaatagcaggcatgctggggaaggaacccctagtgatggagttggccactccctctctgcgcgctcgctcgctcactgaggccgggcgaccaaaggtcgcccgacgcccgggctttgcccgggcggcctcagtgagcgagcgagcgcgc

SEQ ID NO: 3948 - DNA, 267 bp, synthetic construct
  source 1..267: mol_type = other DNA
ggggaccagctatggtaagggatgagagaagccaacagttgtcccaagggtccccctcagggagtggaggttcccctgggaggcgccaggacaggcgcaggtgtatgaaaccagatctgaatcctggtgtggctcggaggcccaggattacgctctggtttctaacaactgaagccagagtcttcgaagggtggtgggctaagggggaagagggcatggtgggcaaaagaaagggggtgggggagagagaaaaggaggacaaggggg

SEQ ID NO: 3949 - DNA, 267 bp, synthetic construct
  source 1..267: mol_type = other DNA
ggggaccagctatggtaagggatgagagaagccaacagttgtcccaagggtccccctcagggagtggaggttcccctgggaggcgccaggacaggcgcaggtgtatttcgattctgaaaccagatcttgtggctcggaggcagatctggagtaagaatcgaataacaactgaagccagagtcttcgaagggtggtgggctaagggggaagagggcatggtgggcaaaagaaagggggtgggggagagagaaaaggaggacaaggggg

SEQ ID NO: 3950 - protein, 4 aa, synthetic construct
RGDR

SEQ ID NO: 3951 - protein, 7 aa, synthetic construct
  VARIANT 5: note = Any amino acid
  VARIANT 6: note = Any amino acid
RGDRXXL

SEQ ID NO: 3952 - DNA, 21 bp, synthetic construct
  source 1..21: mol_type = other DNA
ttctgaaaccagatctgaatc

SEQ ID NO: 3953 - DNA, 21 bp, synthetic construct
  source 1..21: mol_type = other DNA
tcgattctgaaaccagatctg

SEQ ID NO: 3954 - DNA, 21 bp, synthetic construct
  source 1..21: mol_type = other DNA
aaccagatctgaatcctggac